(19) United States
(12) Patent Application Publication
(10) Pub. No.: US 2024/0150741 A1
(43) Pub. Date: May 9, 2024

(54) Engineered CRISPR-Cas9 nucleases with Altered PAM Specificity

(71) Applicant: The General Hospital Corporation, Boston, MA (US)

(72) Inventors: J. Keith Joung, Winchester, MA (US); Benjamin Kleinstiver, Boston, MA (US)

(21) Appl. No.: 18/507,709

(22) Filed: Nov. 13, 2023

Related U.S. Application Data
(63) Continuation of application No. 17/456,092, filed on Nov. 22, 2021, now Pat. No. 11,859,220.
Application No. 17/456,092 is a continuation of application No. 17/012,697, filed on Sep. 4, 2020, now Pat. No. 11,220,678.
Application No. 17/012,697 is a continuation of application No. 16/687,396, filed on Nov. 18, 2019, now Pat. No. 10,808,233.
Application No. 16/687,396 is a division of application No. 15/935,334, filed on Mar. 26, 2018, now Pat. No. 10,479,982.
Application No. 15/935,334 is a division of application No. 15/208,228, filed on Jul. 12, 2016, now Pat. No. 9,926,545.
Application No. 15/208,228 is a division of application No. 15/060,424, filed on Mar. 3, 2016, now Pat. No. 9,944,912.
Application No. 15/935,334 is a continuation of application No. 15/664,873, filed on Jul. 31, 2017, now Pat. No. 10,767,168.
Application No. 15/664,873 is a continuation of application No. 15/208,461, filed on Jul. 12, 2016, now Pat. No. 9,752,132.
Application No. 15/208,461 is a continuation of application No. 15/060,448, filed on Mar. 3, 2016, now Pat. No. 10,202,589.
(60) Provisional application No. 62/127,634, filed on Mar. 3, 2015.
(60) Provisional application No. 62/165,517, filed on May 22, 2015.
(60) Provisional application No. 62/239,737, filed on Oct. 9, 2015.
(60) Provisional application No. 62/258,402, filed on Nov. 20, 2015.
(60) Provisional application No. 62/127,634, filed on Mar. 3, 2015.
(60) Provisional application No. 62/165,517, filed on May 22, 2015.
(60) Provisional application No. 62/239,737, filed on Oct. 9, 2015.
(60) Provisional application No. 62/258,402, filed on Nov. 20, 2015.

(51) Int. Cl. C12N 9/22; C12N 15/10; C12N 15/11; C12N 15/63; C12N 15/90

(52) U.S. Cl. CPC C12N 9/22; C12N 15/102; C12N 15/111; C12N 15/63; C12N 15/90; C12Y 301/00; A01K 2227/40; A61K 38/00; C07K 2319/71; C12N 2310/20; C12N 2800/22; C12N 2800/80

(57) ABSTRACT

Engineered CRISPR-Cas9 nucleases with altered and improved PAM specificities and their use in genomic engineering, epigenomic engineering, and genome targeting.

### CLAIM OF PRIORITY

[0001] This application is a continuation of U.S. patent application Ser. No. 17/456,092, filed Nov. 22, 2021, which is a continuation of U.S. patent application Ser. No. 17/012,697, filed Sep. 4, 2020, now U.S. Pat. No. 11,220,678, which is a continuation of U.S. patent application Ser. No. 16/687,396, filed Nov. 18, 2019, now U.S. Pat. No. 10,808,233, which is a divisional of U.S. patent application Ser. No. 15/935,334, filed Mar. 26, 2018, now U.S. Pat. No. 10,479,982, which is a divisional of U.S. patent application Ser. No. 15/208,228, filed Jul. 12, 2016, now U.S. Pat. No. 9,926,545, which is a divisional application of U.S. patent application Ser. No. 15/060,424, filed Mar. 3, 2016, now U.S. Pat. No. 9,944,912, which claims the benefit of U.S. Provisional Patent Application Serial Nos. 62/127,634, filed on Mar. 3, 2015; 62/165,517, filed on May 22, 2015; 62/239,737, filed on Oct. 9, 2015; and 62/258,402, filed on Nov. 20, 2015. U.S. patent application Ser. No. 15/935,334, now U.S. Pat. No. 10,479,982, is also a continuation of U.S. patent application Ser. No. 15/664,873, filed Jul. 31, 2017, now U.S. Pat. No. 10,767,168, which is a continuation application of U.S. patent application Ser. No. 15/208,461, filed Jul. 12, 2016, now U.S. Pat. No. 9,752,132, which is a continuation application of U.S. patent application Ser. No. 15/060,448, filed Mar. 3, 2016, now U.S. Pat. No. 10,202,589, which claims the benefit of U.S. Provisional Patent Application Serial Nos. 62/127,634, filed on Mar. 3, 2015; 62/165,517, filed on May 22, 2015; 62/239,737, filed on Oct. 9, 2015; and 62/258,402, filed on Nov. 20, 2015. The entire contents of the foregoing are hereby incorporated by reference.

### FEDERALLY SPONSORED RESEARCH OR DEVELOPMENT

[0002] This invention was made with Government support under Grant Nos. DPi GM105378, NIH RO1 GM107427, and RO1 GM088040 awarded by the National Institutes of Health. The Government has certain rights in the invention.

### TECHNICAL FIELD

[0003] The invention relates, at least in part, to engineered Clustered Regularly Interspaced Short Palindromic Repeats (CRISPRs)/CRISPR-associated protein 9 (Cas9) nucleases with altered and improved Protospacer Adjacent Motif (PAM) specificities and their use in genomic engineering, epigenomic engineering, and genome targeting.

### SEQUENCE LISTING

[0004] This application contains a Sequence Listing that has been submitted electronically as an XML file named “40174-0014011_AMENDEDSL_ST26.XML.” The XML file, created on Nov. 17, 2023, is 1,430,722 bytes in size. The material in the XML file is hereby incorporated by reference in its entirety.

### BACKGROUND

[0005] CRISPR-Cas9 nucleases enable efficient, customizable genome editing in a wide variety of organisms and cell types (Sander & Joung, Nat Biotechnol 32, 347-355 (2014); Hsu et al., Cell 157, 1262-1278 (2014); Doudna & Charpentier, Science 346, 1258096 (2014); Barrangou & May, Expert Opin Biol Ther 15, 311-314 (2015)). Target site recognition by Cas9 is directed by two short RNAs known as the crRNA and tracrRNA (Deltcheva et al., Nature 471, 602-607 (2011); Jinek et al., Science 337, 816-821 (2012)), which can be fused into a chimeric single guide RNA (sgRNA) (Jinek et al., Science 337, 816-821 (2012); Jinek et al., Elife 2, e00471 (2013); Mali et al., Science 339, 823-826 (2013); Cong et al., Science 339, 819-823 (2013)). The 5′ end of the sgRNA (derived from the crRNA) can base pair with the target DNA site, thereby permitting straightforward re-programming of site-specific cleavage by the Cas9/sgRNA complex (Jinek et al., Science 337, 816-821 (2012)). However, Cas9 must also recognize a specific protospacer adjacent motif (PAM) that lies proximal to the DNA that base pairs with the sgRNA (Mojica et al., Microbiology 155, 733-740 (2009); Shah et al., RNA Biol 10, 891-899 (2013); Jinek et al., Science 337, 816-821 (2012); Sapranauskas et al, Nucleic Acids Res 39, 9275-9282 (2011); Horvath et al., J Bacteriol 190, 1401-1412 (2008)), a requirement that is needed to initiate sequence-specific recognition (Sternberg et al., Nature 507, 62-67 (2014)) but that can also constrain the targeting range of these nucleases for genome editing. The broadly used Streptococcus pyogenes Cas9 (SpCas9) recognizes a short NGG PAM (Jinek et al., Science 337, 816-821 (2012); Jiang et al., Nat Biotechnol 31, 233-239 (2013)), which occurs once in every 8 bps of random DNA sequence. By contrast, other Cas9 orthologues characterized to date can recognize longer PAMs (Horvath et al., J Bacteriol 190, 1401-1412 (2008); Fonfara et al., Nucleic Acids Res 42, 2577-2590 (2014); Esvelt et al., Nat Methods 10, 1116-1121 (2013); Ran et al., Nature 520, 186-191 (2015); Zhang et al., Mol Cell 50, 488-503 (2013)). For example, Staphylococcus aureus Cas9 (SaCas9), one of several smaller Cas9 orthologues that are better suited for viral delivery (Horvath et al., J Bacteriol 190, 1401-1412 (2008); Ran et al., Nature 520, 186-191 (2015); Zhang et al., Mol Cell 50, 488-503 (2013)), recognizes a longer NNGRRT (SEQ ID NO:46) PAM that is expected to occur once in every 32 bps of random DNA. Broadening the targeting range of Cas9 orthologues is important for various applications including the modification of small genetic elements (e.g., transcription factor binding sites (Canver et al. Nature.; 527(7577):192-7 (2015); Vierstra et al., Nat Methods. 12(10):927-30 (2015)) or performing allele-specific alterations by positioning sequence differences within the PAM (Courtney, D. G. et al. Gene Ther. 23(1):108-12 (2015).

### SUMMARY

[0006] As described herein, the commonly used Streptococcus pyogenes Cas9 (SpCas9) as well as the Staphylococcus aureus Cas9 (SaCas9) were engineered to recognize novel PAM sequences using structural information, bacterial selection-based directed evolution, and combinatorial design. These altered PAM specificity variants enable robust editing of endogenous gene sites in zebrafish and human cells that cannot be efficiently targeted by wild-type SpCas9 or SaCas9. In addition, we identified and characterized another SpCas9 variant that exhibits improved PAM specificity in human cells, possessing reduced activity on sites with non-canonical NAG and NGA PAMs. Furthermore, we found that two smaller-size Cas9 orthologues with completely different PAM specificities, Streptococcus thermophilus Cas9 (St1Cas9) and Staphylococcus aureus Cas9 (SaCas9), function efficiently in our bacterial selection system and in human cells, suggesting that our engineering strategies could be extended to Cas9s from other species. Our findings provide broadly useful SpCas9 and SaCas9 variants, referred to collectively herein as “variants” or “the variants”.

[0007] In a first aspect, the invention provides isolated Streptococcus pyogenes Cas9 (SpCas9) proteins with mutations at one or more of the following positions: G1104, S1109, L1111, D1135, S1136, G1218, N1317, R1335, T1337, e.g., comprising a sequence that is at least 80% identical to the amino acid sequence of SEQ ID NO:1. In some embodiments, the variant SpCas9 proteins comprise one or more of the following mutations: G1104K; 51109T; L1111H; D1135V; D1135E; D1135N; D1135Y; 51136N; G1218R; N1317K; R1335E; R1335Q; and T1337R. In some embodiments, the variant SpCas9 proteins comprise the following mutations: D1135; D1135V/R1335Q/T1337R (VQR variant); D1135E/R1335Q/T1337R (EQR variant); D1135V/G1218/R1335Q/T1337R (VRQR variant); D1135N/G1218R/R1335Q/T1337R (NRQR variant); D1135Y/G1218R/R1335Q/T1337R (YRQR variant); G1104K/D1135V/G1218R/R1335Q/T1337R (KVRQR variant); 51109T/D1135V/G1218R/R1335Q/T1337R (TVRQR variant); L1111H/D1135V/G1218R/R1335Q/T1337R (HVRQR variant); D1135V/S1136N/G1218R/R1335Q/T1337R (VNRQR variant); D1135V/G1218R/N1317K/R1335Q/T1337R (VRKQR variant); or D1135V/G1218R/R1335E/T1337R (VRER variant).

[0008] In some embodiments, the variant SpCas9 proteins comprise one or more mutations that decrease nuclease activity selected from the group consisting of mutations at D10, E762, D839, H983, or D986; and at H840 or N863.

[0009] In some embodiments, the mutations are: (i) D10A or D10N, and (ii) H840A, H840N, or H840Y.

[0010] Also provided herein are isolated Staphylococcus aureus Cas9 (SaCas9) proteins with mutations at one or more of the following positions: E782, N968, and/or R1015, e.g., comprising a sequence that is at least 80% identical to the amino acid sequence of SEQ ID NO:2. Also provided herein are isolated Staphylococcus aureus Cas9 (SaCas9) proteins with mutations at one, two or more of the following positions: E735, E782, K929, N968, A1021, K1044 and/or R1015. In some embodiments, the variant SaCas9 proteins comprise one or more of the following mutations: R1015Q, R1015H, E782K, N968K, E735K, K929R, A1021T, K1044N. In some embodiments, the variant SaCas9 proteins comprise one or more mutations that decrease nuclease activity selected from the group consisting of mutations at D10, D556, H557, and/or N580. In some embodiments, the variant SaCas9 proteins comprise mutations at D10A, D556A, H557A, N580A, e.g., D10A/H557A and/or D10A/D556A/H557A/N580A.

[0011] SpCas9 variants described herein can include the amino acid sequence of SEQ ID NO:1, with mutations at one or more of the following positions: D1135, G1218, R1335, T1337. In some embodiments, the SpCas9 variants can include one or more of the following mutations: D1135V; D1135E; G1218R; R1335E; R1335Q; and T1337R. In some embodiments, the SpCas9 variants can include one of the following sets of mutations: D1135V/R1335Q/T1337R (VQR variant); D1135V/G1218R/R1335Q.T1337R (VRQR variant); D1135E/R1335Q/T1337R (EQR variant); or D1135V/G1218R/R1335E/T1337R (VRER variant).

[0012] SaCas9 variants described herein can include the amino acid sequence of SEQ ID NO:2, with mutations at one or more of the following positions: E735, E782, K929, N968, R1015, A1021, and/or K1044. In some embodiments, the SaCas9 variants can include one or more of the following mutations: R1015Q, R1015H, E782K, N968K, E735K, K929R, A1021T, K1044N. In some embodiments, the SaCas9 variants can include one of the following sets of mutations: E782K/N968K/R1015H (KKH variant); E782K/K929R/R1015H (KRH variant); or E782K/K929R/N968K/R1015H (KRKH variant).

[0013] Also provided herein are fusion protein comprising the isolated variant SaCas9 or SpCas9 proteins described herein fused to a heterologous functional domain, with an optional intervening linker, wherein the linker does not interfere with activity of the fusion protein. In some embodiments, the heterologous functional domain is a transcriptional activation domain. In some embodiments, the transcriptional activation domain is from VP64 or NF-κB p65. In some embodiments, the heterologous functional domain is a transcriptional silencer or transcriptional repression domain. In some embodiments, the transcriptional repression domain is a Krueppel-associated box (KRAB) domain, ERF repressor domain (ERD), or mSin3A interaction domain (SID). In some embodiments, the transcriptional silencer is Heterochromatin Protein 1 (HP1), e.g., HP1α or HP1β. In some embodiments, the heterologous functional domain is an enzyme that modifies the methylation state of DNA. In some embodiments, the enzyme that modifies the methylation state of DNA is a DNA methyltransferase (DNMT) or a TET protein. In some embodiments, the TET protein is TET1. In some embodiments, the heterologous functional domain is an enzyme that modifies a histone subunit. In some embodiments, the enzyme that modifies a histone subunit is a histone acetyltransferase (HAT), histone deacetylase (HDAC), histone methyltransferase (HMT), or histone demethylase. In some embodiments, the heterologous functional domain is a biological tether. In some embodiments, the biological tether is MS2, Csy4 or lambda N protein. In some embodiments, the heterologous functional domain is FokI.

[0014] Also provided herein are isolated nucleic acids encoding the variant SaCas9 or SpCas9 proteins described herein, as well as vectors comprising the isolated nucleic acids, optionally operably linked to one or more regulatory domains for expressing the variant SaCas9 or SpCas9 proteins described herein. Also provided herein are host cells, e.g., mammalian host cells, comprising the nucleic acids described herein, and optionally expressing the variant SaCas9 or SpCas9 proteins described herein.

[0015] Also provided herein are methods of altering the genome of a cell, by expressing in the cell an isolated variant SaCas9 or SpCas9 protein described herein, and a guide RNA having a region complementary to a selected portion of the genome of the cell.

[0016] Also provided herein are methods for altering, e.g., selectively altering, the genome of a cell by expressing in the cell the variant proteins, and a guide RNA having a region complementary to a selected portion of the genome of the cell.

[0017] Also provided are methods for altering, e.g., selectively altering, the genome of a cell by contacting the cell with a protein variant described herein, and a guide RNA having a region complementary to a selected portion of the genome of the cell.

[0018] In some embodiments, the isolated protein or fusion protein comprises one or more of a nuclear localization sequence, cell penetrating peptide sequence, and/or affinity tag.

[0019] In some embodiments of the methods described herein, the cell is a stem cell, e.g., an embryonic stem cell, mesenchymal stem cell, or induced pluripotent stem cell; is in a living animal; or is in an embryo, e.g., a mammalian, insect, or fish (e.g., zebrafish) embryo or embryonic cell.

[0020] Further, provided herein are methods, e.g., in vitro methods, for altering a double stranded DNA (dsDNA) molecule. The methods include contacting the dsDNA molecule with one or more of the variant proteins described herein, and a guide RNA having a region complementary to a selected portion of the dsDNA molecule.

[0021] Unless otherwise defined, all technical and scientific terms used herein have the same meaning as commonly understood by one of ordinary skill in the art to which this invention belongs. Methods and materials are described herein for use in the present invention; other, suitable methods and materials known in the art can also be used. The materials, methods, and examples are illustrative only and not intended to be limiting. All publications, patent applications, patents, sequences, database entries, and other references mentioned herein are incorporated by reference in their entirety. In case of conflict, the present specification, including definitions, will control.

[0022] Other features and advantages of the invention will be apparent from the following detailed description and FIGs, and from the claims.

### DESCRIPTION OF DRAWINGS

[0023] FIGS. 1A-J|Evolution and characterization of SpCas9 variants with altered PAM specificities. A, Rational mutation of the SpCas9 residues that make base-specific contacts to the PAM bases is insufficient to alter PAM specificity in the U2OS human cell-based Enhanced Green Fluorescent Protein (EGFP) disruption assay. Disruption frequencies were quantified by flow cytometry; the mean level of disruption observed with the background control is represented by the dottedline for this and subsequent panels (C, G, H, and J); error bars represent s.e.m., n=3. B, Schematic of the two-plasmid positive selection assay used to alter the PAM specificity of SpCas9. Cleavage of a target site within the positive selection plasmid by a functional Cas9/sgRNA complex is necessary for survival when bacteria are plated on selective media (see also FIGS. 12A-B). C, Combinatorial assembly and testing of mutations obtained from the positive selection for SpCas9 variants that can cleave a target site containing an NGA PAM. SpCas9 Variants were paired with sgRNAs that target sites containing either an NGG or an NGA PAM and activity was assessed using the EGFP disruption assay. Error bars represent s.e.m., n=3. D, Schematic of the negative selection assay, in which cleavage of the selection plasmid results in cell death when bacteria are plated on selective media. This system was adapted to profile the PAM specificity of Cas9 by generating a library of plasmids that contain a randomized sequence adjacent to the 3′ end of the protospacer (see also FIG. 13B). E, Scatterplot of the post-selection PAM depletion values (PPDVs) of wild-type SpCas9 with two randomized PAM libraries (each with a different protospacer). PAMs were grouped and plotted by their 2^{nd}/3^{rd}/4^{th} positions. The dashed line indicates the cutoff for statistically significant depletion (obtained from a dCas9 control experiment, see FIG. 13C), and the gray dashed line represents five-fold depletion (PPDV of 0.2). F, PPDV scatterplots for the VQR and EQR SpCas9 variants that recognize PAMs distinct from those recognized by wild-type SpCas9. G, EGFP disruption frequencies for wild-type, VQR, and EQR SpCas9 on sites with NGAN and NGNG PAMs. Error bars represent s.e.m., n=3. H, Combinatorial assembly and testing of mutations obtained from the positive selection for SpCas9 variants that can cleave a target site containing an NGCG PAM. sgRNAs that target sites containing either an NGGG or an NGCG PAM were assessed for Cas9 targeting using the EGFP disruption assay. Error bars represent s.e.m., n=3. I, PPDV scatterplot for the VRER variant. J, EGFP disruption frequencies for wild-type and VRER SpCas9 on sites with NGCN and NGNG PAMs. Error bars represent s.e.m., n=3.

[0024] FIGS. 2A-F|SpCas9 variants with evolved PAM specificities robustly modify endogenous sites in zebrafish embryos and human cells. A, Quantification of mutagenesis frequencies in zebrafish embryos induced by wild-type or VQR SpCas9 on endogenous gene sites bearing NGAG PAMs. Mutation frequencies were determined using the T7E1 assay; error bars represent s.e.m., n=5 to 9 individual embryos. B, Mutation frequencies of the VQR variant quantified by T7E1 assay at 16 target sites in four endogenous human genes with sgRNAs targeted to sites containing NGAG, NGAT, and NGAA PAMs. Error bars represent s.e.m., n=3. C, Mutation frequencies of wild-type SpCas9 on endogenous human gene target sites with NGA PAMs. For ease of comparison, the mutation frequencies for the VQR variant using the same sgRNAs are re-presented here (same data shown in panel B). Error bars represent s.e.m., n=3; n.d., not detectable by T7E1. D, Mutation frequencies of wild-type, VRER, and VQR SpCas9 at nine target sites containing NGCG PAMs in three endogenous human genes quantified by T7E1 assay. sgRNA complementarity lengths of 19 and 20 nt were used; error bars represent s.e.m., n=3. E, Representation of the number sites in the human genome with 20 nt spacers targetable by wild-type, VQR, and VRER SpCas9. F, Number of off-target cleavage sites identified by GUIDE-seq for the VQR and VRER SpCas9 variants using sgRNAs from panels B and D.

[0025] FIGS. 3A-G|A D1135E mutation improves the PAM recognition and spacer specificity of SpCas9. A, PPDV scatterplots for wild-type and D1135E SpCas9 (left and right panels, respectively) for the two randomized PAM libraries. PAMs were grouped and plotted by their 2^{nd}/3^{rd}/4^{th} positions. The data shown for wild-type SpCas9 is the same as the plot from FIGS. 1D and is re-presented here for ease of comparison. The dashed line indicates PAMs that are statistically significantly depleted (see FIG. 13C), and the gray dashed line indicates a five-fold depletion cutoff (PPDV of 0.2). B, EGFP disruption activities of wild-type and D1135E SpCas9 on sites that contain NGG, NAG, and NGA PAMs in human cells. Disruption frequencies were quantified by flow cytometry; the mean level of disruption observed with the background control is represented by the dashed line for this panel and (D); error bars represent s.e.m., n=3; mean fold change in activity is shown. C, Mutagenesis frequencies detected by T7E1 for wild-type and D1135E SpCas9 at six endogenous sites in human cells. Error bars represent s.e.m., n=3; mean fold change in activity is shown. D, Titration of the amount of wild-type or D1135E SpCas9-encoding plasmid transfected for EGFP disruption experiments in human cells. The amount of sgRNA plasmid used for all of these experiments was fixed at 250 ng. Two sgRNAs targeting different EGFP sites were used; error bars represent s.e.m., n=3. E, Targeted deep-sequencing of on- and off-target sites for 3 sgRNAs using wild-type and D1135E SpCas9 (SEQ ID NOS 660-687, respectively, in order of appearance). The on-target site is shown at the top, with off-target sites listed below highlighting mismatches to the on-target. Fold decreases in activity with D1135E relative to wild-type SpCas9 at off-target sites greater than the change in activity at the on-target site are highlighted; control indel levels for each amplicon are reported. F, Summary of the targeted deep-sequencing data, plotted as the fold-decrease in activity at on- and off-target sites using D1135E relative to the indel frequency observed with wild-type SpCas9. G, Summary of GUIDE-seq detected changes in specificity between wild-type and D1135E at off-target sites, plotted as the normalized fold-change in specificity using D1135E versus the read counts at that off-target site using wild-type SpCas9 (see also FIG. 18C). Estimated fold-gain in specificity at sites without read-counts for D1135E are not plotted (see FIG. 18C).

[0026] FIGS. 4A-G|Characterization of St1Cas9 and SaCas9 orthologues in bacteria and human cells. A, PPDV scatterplots for St1Cas9 using the two randomized PAM libraries. PAMs were grouped and plotted by their 3^{rd}/4^{th}/5^{th}/6^{th} positions. sgRNA complementarity lengths of 20 and 21 nucleotides were used to program St1Cas9 for both libraries (left and right panels, respectively). The dashed line indicates PAMs that are statistically significantly depleted (see FIG. 13C), and the gray dashed line represents five-fold depletion (PPDV of 0.2); a, PAM previously predicted by a bioinformatic approach²⁷; β, PAMs previously identified under stringent experimental conditions²⁰; *, novel PAMs discovered in this study; y, PAMs previously identified under moderate experimental conditions²⁰ (PAM 1 disclosed as SEQ ID NO: 3). B, PPDV scatterplots for SaCas9 using the two randomized PAM libraries. PAMs were grouped and plotted by their 3^{rd}/4^{th}/5^{th}/6^{th} positions. sgRNA complementarity lengths of 21 and 23 nucleotides were used to program SaCas9 for both libraries (left and right panels, respectively). PAMs identified for SaCas9 are shown, with PAMs 1-3 consistently depleted across all combinations of spacer and spacer length used in these experiments (PAMs 1-3 disclosed as SEQ ID NOS 4, 6 and 5, respectively, in order of appearance). C, Survival percentages of St1Cas9 and SaCas9 in the bacterial positive selection when challenged with selection plasmids that harbor different target sites and PAMs indicated on the x-axis. Highly depleted PAMs from panels (A) and (B) for St1Cas9 and SaCas9 were used for the target sites in the positive selection plasmids (SEQ ID NOS 3, 3, 5, 5, 5 and 3, respectively, in order of appearance). D, E, EGFP disruption activities of St1Cas9 (panel D) or SaCas9 (panel E) on sites in EGFP that contain NNAGAA (SEQ ID NO:3) or NNGGGT (SEQ ID NO:4)/NNGAGT (SEQ ID NO:5) PAMs, respectively. Matched sgRNAs of different lengths for the same site are indicated; disruption frequencies were quantified by flow cytometry; the mean frequency of EGFP disruption obtained with a negative control is represented by the dashed line; error bars represent s.e.m., n=3. F, G, Mutation frequencies of St1Cas9 (panel F) and SaCas9 (panel G) quantified by T7E1 assay at sites in four endogenous human genes that contain NNAGAA (SEQ ID NO:3) or NNGGGT (SEQ ID NO:4)/NNGAGT (SEQ ID NO:5)/NNGAAT (SEQ ID NO:6) PAMs, respectively. Error bars represent s.e.m., n=3; n.d., not detectable by T7E1.

[0027] FIGS. 5A-J. Sequences and Maps—plasmids used in this study

| | | SEQ ID | |
|---|---|---|---|
| FIG | Name | NO | Description |
| 5A | BPK764 | 7 | T7-humanSpCas9-NLS-3xFLAG-T7-BsaIcassette-SpgRNA |
| | | | T7 promoters: nts 1-17 and 4360-4376; human codon optimized S. |
| | | | pyogenes Cas9 88-4224; Nuclear Localization Signal (NLS) |
| | | | (CCCAAGAAGAAGAGGAAAGTC (SEQ ID NO: 650)) at nts 4198- |
| | | | 4218, 3xFLAG tag 4225-4290, BsaI sites 4379-4384 and 4427- |
| | | | 4432, gRNA |
| | | | (GTTTTAGAGCTAGAAATAGCAAGTTAAAATAAGGCTAGTCCG |
| | | | TTATCAACTTGAAAAAGTGGCACCGAGTCGGTGC (SEQ ID |
| | | | NO: 651)) 4434-4509, T7 terminator 4252-4572 of SEQ ID NO: 7 |
| | MSP712 | 8 | T7-humanSpdCas9(D10A/H840A)-T7-BsaIcassette-SpgRNA |
| | | | T7 promoters at nts 1-17 and 4360-4376, human codon optimized |
| | | | S. pyogenes Cas9 88-4293, modified codons iat 115-117 and |
| | | | 2605-2607, bold and underlined, NLS |
| | | | (CCCAAGAAGAAGAGGAAAGTC (SEQ ID NO: 650)) at nts 4198- |
| | | | 4218, 3xFLAG tag 4225-4290, BsaI sites 4379-4384 and 4427- |
| | | | 4432, gRNA |
| | | | (GTTTTAGAGCTAGAAATAGCAAGTTAAAATAAGGCTAGT |
| | | | CCGTTATCAACTTGAAAAAGTGGCACCGAGTCGGTGC (SEQ |
| | | | ID NO: 651)) at nts 4434-4509, T7 terminator 4252-4572 of SEQ |
| | | | ID NO: 8 |
| 5B | BPK2169 | 9 | T7-humanSt1Cas9-NLS-T7-BspMIcassette-St1gRNA |
| | | | T7 promoters at 1-17 and 3555-3571, human codon optimized S. |
| | | | thermophilus1 Cas9 at 88-3489, NLS at 3454 to 3486; BspMI sites |
| | | | at 3577-3582 and 3625-3630, gRNA at 3635-3763, T7 terminator |
| | | | 3778-3825 of SEQ ID NO: 9. |
| 5C | BPK2101 | 10 | T7-humanSaCas9-NLS-3xFLAG-T7-BsaIcassette-SagRNA |
| | | | T7 promoters at 1-17 and 3418-3434, human codon optimized S. |
| | | | aureus Cas9 at 88-3352, NLS at 3256-3276, 3xFLAG tag at 3283- |
| | | | 3348, BsaI sites at 3437-3442 and 3485-3490, gRNA at 3492- |
| | | | 3616, T7 terminator at 3627-2674 of SEQ ID NO: 10. |
| 5D | p11-lacY- | — | BAD-ccDB-Amp^{R}-AraC-lacY(A177C) |
| | wtx 1¹⁷ | | |
| 5E | JDS246 | 11 | CMV-T7-humanSpCas9-NLS-3xFLAG ADDGENE ID: 43861 |
| | | | Human codon optimized S. pyogenes Cas9 1-4206, NLS at 4111- |
| | | | 4131, 3xFLAG tag at 4138-4203 of SEQ ID NO: 11. |
| | MSP469 | 12 | CMV-T7-humanSpCas9(D1135V/R1335Q/T1337R)-NLS-3xFLAG |
| | | | (VQR variant) |
| | | | Human codon optimized S. pyogenes Cas9 1-4206, modified |
| | | | codons at 3403-3405, 4003-4005, and 4009-4011, NLS at 411- |
| | | | 4131, 3xFLAG tag 4138-4203 of SEQ ID NO: 12. |
| | MSP680 | 13 | CMV-T7-humanSpCas9(D1135E/R1335Q/T1337R)-NLS-3xFLAG |
| | | | (EQR variant) |
| | | | Human codon optimized S. pyogenes Cas9 1-4206, modified |
| | | | codons at 3403-3405, 3652-3654, 4003-4005, and 4009-4011, |
| | | | NLS at 411-4131, 3xFLAG tag 4138-4203 of SEQ ID NO: 13. |
| | MSP1101 | 14 | CMV-T7-humanSpCas9(D1135V/G1218R/R1335E/T1337R)-NLS- |
| | | | 3xFLAG |
| | | | (VRER variant) |
| | | | Human codon optimized S. pyogenes Cas9 1-4206, modified |
| | | | codons at 3403-3405, 4003-4005, and 4009-4011, NLS at 411- |
| | | | 4131, 3xFLAG tag 4138-4203 of SEQ ID NO: 14 |
| | MSP977 | 15 | CMV-T7-humanSpCas9(D1135E)-NLS-3xFLAG |
| | | | Human codon optimized S. pyogenes Cas9 1-4206, modified |
| | | | codons at 3403-3405, NLS at 411-4131, 3xFLAG tag 4138-4203 |
| | | | of SEQ ID NO: 15. |
| 5F | MSP1393 | 16 | CAG-humanSt1Cas9-NLS |
| | | | Human codon optimized S. thermophilus1 Cas9 1-3402, NLS at |
| | | | 3367-3399 of SEQ ID NO: 16. |
| 5G | BPK2139 | 17 | CAG-humanSaCas9-NLS-3xFLAG |
| | | | Human codon optimized S. aureus Cas9 1-3195, NLS 3169-3189, |
| | | | 3xFLAG tag 3196-3261 of SEQ ID NO: 17. |
| 5H | BPK1520 | 18 | U6-BsmBIcassette-SpgRNA |
| | | | U6 promoter at 1-318, BsmBI sites at 320-325 and 333-338, S. |
| | | | pyogenes gRNA 339-422, U6 terminator 416-422 of SEQ ID |
| | | | NO: 18. |
| 51 | BPK2301 | 19 | U6-BsmBIcassette-St1gRNA |
| | | | U6 promoter 1-318, BsmBI sites at 320-325 and 333-338, S. |
| | | | thermophilus1 gRNA 340-471, U6 terminator 464-471 of SEQ ID |
| | | | NO: 19. |
| 5J | VVT1 | 20 | U6-BsmBIcassette-SagRNA |
| | | | U6 promoter 1-318, BsmBI sites at 320-325 and 333-338, S. |
| | | | aureus gRNA 340-466, U6 terminator 459-466 of SEQ ID NO: 20. |

[0028] FIG. 6|Alignment of Cas9 orthologues to predict PAM-interacting residues of SaCas9. The PAM-interacting domains of SpCas9, SaCas9, and 11 other Cas9 orthologues were aligned to identify PAM contacting residues in SaCas9, based on what is known for SpCas9. Top, Top, S. Pyogenes, amino acids 1229-1368 of SEQ ID NO:1, then SEQ ID NOs:29-40, respectively.

[0029] FIG. 7|Substitutions in SaCas9 assessed for activity against different PAMs in the bacterial screen. Based on the alignment from FIG. 6, single amino acid substitutions were tested in the bacterial positive selection to screen for effects on activity against a canonical NNGAGT (SEQ ID NO:5) and non-canonical NNAAGT (SEQ ID NO:41) and NNAGGT (SEQ ID NO:42) PAMs. Bacterial colonies on the selective media suggest that the SaCas9 variant has activity against a site containing the indicated PAM.

[0030] FIGS. 8A-B|Summary of amino acid substitutions that enable SaCas9 variants to target NNARRT (SEQ ID NO:43) PAMs. Amino acid sequences of the PAM-interacting domain of 52 selected mutant SaCas9 clones that enabled survival in bacteria against sites containing an NNARRT (SEQ ID NO:43) PAM; the sequences presented are partial sequences of SEQ ID NOs:53-104 shown in Table 6 (SEQ ID NOS 967-1019, respectively, in order of appearance). Figure discloses “IIKKG” as SEQ ID NO: 966.

[0031] FIG. 9|Human cell activity of wild-type and engineered SaCas9 variants. Activity of wild-type, KKQ, and KKH SaCas9 was assessed in the human cell EGFP reporter assay against sites containing NNRRRT (SEQ ID NO:45) PAMs.

[0032] FIG. 10. SaCas9 activity against non-canonical PAMs in bacteria, and how directed mutations at R1015 impact activity against the same non-canonical PAMs (SEQ ID NOS 5, 511-514, 5, 511-512, 5, 513-514, 5 and 513-514, respectively, in order of appearance).

[0033] FIG. 11. Engineered variants can recognize PAMs of the form NNNRRT (SEQ ID NOS 5, 41-42, and 511-514, respectively, in order of appearance, on both the left and right side of the figure)

[0034] FIGS. 12A-B|Bacterial-based positive selection used to engineer altered PAM specificity variants of SpCas9. A, Expanded schematic of the positive selection from FIG. 1B (left panel), and validation that SpCas9 behaves as expected in the positive selection (right panel). Spacer 1, SEQ ID NO:105; Spacer 2, SEQ ID NO:106. B, Schematic of how the positive selection was adapted to select for SpCas9 variants that have altered PAM recognition specificities. A library of SpCas9 clones with randomized PAM-interacting (PI) domains (residues 1097-1368) is challenged by a selection plasmid that harbors an altered PAM (target site disclosed as SEQ ID NO: 688). SpCas9 variants that survive the selection by cleaving the positive selection plasmid are sequenced to determine the mutations that enable altered PAM specificity.

[0035] FIGS. 13A-D|Bacterial cell-based site-depletion assay for profiling the global PAM specificities of Cas9 nucleases. A, Expanded schematic illustrating the negative selection from FIG. 1D (left panel), and validation that wild-type SpCas9 behaves as expected in a screen of sites with functional (NGG) and non-functional (NGA) PAMs (right panel). B, Schematic of how the negative selection was used as a site-depletion assay to screen for functional PAMs by constructing negative selection plasmid libraries containing 6 randomized base pairs in place of the PAM. Selection plasmids that contain PAMs cleaved by a Cas9/sgRNA of interest are depleted while PAMs that are not cleaved (or poorly cleaved) are retained. The frequencies of the PAMs following selection are compared to their pre-selection frequencies in the starting libraries to calculate the post-selection PAM depletion value (PPDV). Spacer 1, SEQ ID NO: 689; Spacer 2, SEQ ID NO: 690. C, D, A cutoff for statistically significant PPDVs was established by plotting the PPDV of PAMs for catalytically inactive SpCas9 (dCas9) (grouped and plotted by their 2nd/3rd/4th positions) for the two randomized PAM libraries (C). A threshold of 3.36 standard deviations from the mean PPDV for the two libraries was calculated (columns in (D)), establishing that any PPDV deviation below 0.85 is statistically significant compared to dCas9 treatment (dashed line in (C)). The gray dashed line in (C) indicates a five-fold depletion in the assay (PPDV of 0.2).

[0036] FIG. 14|Concordance between the site-depletion assay and EGFP disruption activity. Data points represent the average EGFP disruption of the two NGAN and NGNG PAM sites for the VQR and EQR SpCas9 variants (FIG. 1G) plotted against the mean PPDV observed for library 1 and 2 (FIG. 1F) for the corresponding PAM. The dashed line indicates PAMs that are statistically significantly depleted (PPDV of 0.85, see FIG. 13C), and the gray dashed line represents five-fold depletion (PPDV of 0.2). Mean values are plotted with the 95% confidence interval.

[0037] FIG. 15|Insertion or deletion mutations induced by the VQR SpCas9 variant at endogenous zebrafish sites containing NGAG PAMs. For each target locus, the wild-type sequence is shown at the top with the protospacer and the PAM is marked as underlined text. Deletions are shown as dashes highlighted in gray and insertions as lower case letters highlighted. The net change in length caused by each indel mutation is shown on the right (+, insertion; −, deletion). Note that some alterations have both insertions and deletions of sequence and in these instances the alterations are enumerated in parentheses. The number of times each mutant allele was recovered (if more than once) is shown in brackets.

[0038] FIGS. 16A-B|Endogenous genes targeted by wild-type and evolved variants of SpCas9. A, Sequences targeted by wild-type, VQR, and VRER SpCas9 are shown in backward slashes, forward slashes, respectively. Sequences of sgRNAs and primers used to amplify these loci for T7E1 are provided in Tables 1 and 2, below. B, Mean mutagenesis frequencies detected by T7E1 for wild-type SpCas9 at eight target sites bearing NGG PAMs in the four different endogenous human genes (corresponding to the annotations in the top panel). Error bars represent s.e.m., n=3.

[0039] FIGS. 17A-B|Specificity profiles of the VQR and VRER SpCas9 variants determined using GUIDE-seq. The intended on-target site is marked with a black square, and mismatched positions within off-target sites are highlighted. A, The specificity of the VQR variant was assessed in human cells by targeting endogenous sites containing NGA PAMs: EMX1 site 4 (SEQ ID NO:142 and variants disclosed as SEQ ID NOS 691-692, respectively, in order of appearance), FANCF site 1 (SEQ ID NO:143 and variants disclosed as SEQ ID NOS 693-699, respectively, in order of appearance), FANCF site 3 (SEQ ID NO: 144 and variants disclosed as SEQ ID NOS 700-702, respectively, in order of appearance), FANCF site 4 (SEQ ID NO:145 and variant disclosed as SEQ ID NO: 703), RUNX1 site 1 (SEQ ID NO:146 and variants disclosed as SEQ ID NOS 704-714, respectively, in order of appearance), RUNX1 site 3 (SEQ ID NO:147 and variants disclosed as SEQ ID NOS 715-771, respectively, in order of appearance), VEGFA site 1 (SEQ ID NO:148 and variant disclosed as SEQ ID NO: 772), and ZSCAN2 (SEQ ID NO: 149 and variants disclosed as SEQ ID NOS 773-794, respectively, in order of appearance). B, The specificity of the VRER variant was assessed in human cells by targeting endogenous sites containing NGCG PAMs: FANCF site 3 (SEQ ID NO:150 and variants disclosed as SEQ ID NOS 795-796, respectively, in order of appearance), FANCF site 4 (SEQ ID NO:151 and variants disclosed as SEQ ID NOS 797-798, respectively, in order of appearance), RUNX1 site 1 (SEQ ID NO:152 and variant disclosed as SEQ ID NO: 799), VEGFA site 1 (SEQ ID NO:153 and variants disclosed as SEQ ID NOS 800-804, respectively, in order of appearance), and VEGFA site 2 (SEQ ID NO:154 and variant disclosed as SEQ ID NO: 805).

[0040] FIGS. 18A-C|Activity differences between D1135E and wild-type SpCas9 at off-target sites detected by GUIDE-seq. A, Mean frequency of oligo tag integration at the on-target sites, estimated by restriction fragment length polymorphism analysis. Error bars represent s.e.m., n=4. B, Mean mutagenesis frequencies at the on-target sites detected by T7E1. Error bars represent s.e.m., n=4. C, GUIDE-seq read-count differences between wild-type SpCas9 and D1135E at 3 endogenous human cell sites (EMX1 site 3 (SEQ ID NO:155 and variants disclosed as SEQ ID NOS 806-812, respectively, in order of appearance); ZNF629 site (SEQ ID NO:156 and variants disclosed as SEQ ID NOS 813-826, respectively, in order of appearance),VEGFA site 3 (SEQ ID NO:157 and variants disclosed as SEQ ID NOS 827-873, respectively, in order of appearance). The on-target site is shown at the top and off-target sites are listed below with mismatches highlighted. In the table, a ratio of off-target activity to on-target activity is compared between wild-type and D1135E to calculate the normalized fold-changes in specificity (with gains in specificity in bold). For sites without detectable GUIDE-seq reads, a value of 1 has been assigned to calculate an estimated change in specificity. Off-target sites analyzed by deep-sequencing in FIG. 3E are numbered to the left of the EMX1 site 3 and VEGFA site 3 off-target sites.

[0041] FIGS. 19A-F|Additional PAMs for St1Cas9 and SaCas9 and activities based on spacer lengths in human cells. A, PPDV scatterplots for St1Cas9 comparing the sgRNA complementarity lengths of 20 and 21 nucleotides obtained with a randomized PAM library for spacer 1 (top panel) or spacer 2 (bottom panel). PAMs were grouped and plotted by their 3rd/4th/5th/6th positions (“nnAGAA” disclosed as SEQ ID NO: 3). The dashed line indicates PAMs that are statistically significantly depleted (see FIG. 13C) and the gray dashed line represents five-fold depletion (PPDV of 0.2). B, Table of PAMs with PPDVs of less than 0.2 for St1Cas9 under each of the four conditions tested. PAM numbering shown on the left is the same as in FIG. 4A(PAM 1 disclosed as SEQ ID NO: 3). C, PPDV scatterplots for SaCas9 comparing the sgRNA complementarity lengths of 21 and 23 nucleotides obtained with a randomized PAM library for spacer 1 (top panel) or spacer 2 (bottom panel). PAM were grouped and plotted by their 3rd/4th/5th/6th positions. The dashed lines are the same as in (A). D, Table of PAMs with PPDVs of less than 0.2 for SaCas9 under each of the four conditions tested. PAM numbering is the same as in FIG. 4B(“nnGGGT” disclosed as SEQ ID NO: 4, “nnGAAT” disclosed as SEQ ID NO: 6, “nnGAGT” disclosed as SEQ ID NO: 5, “nnAAGT” disclosed as SEQ ID NO 41, “nnAGGT” disclosed as SEQ ID NO: 42 and “nnCAGT” disclosed as SEQ ID NO: 511). E, F, Human cell activity of St1Cas9 and SaCas9 across various spacer lengths via EGFP disruption (panel E, data from FIGS. 4D, 4E) and endogenous gene mutagenesis detected by T7E1 (panel F, data from FIGS. 4F, 4G). Activity for all replicates shown (n=3 or 4); bars illustrate mean and 95% confidence interval; number of sites per spacer length indicated.

[0042] FIGS. 20A-B|Structural and functional roles of D1135, G1218, and T1337 in PAM recognition by SpCas9. A, Structural representations of the six residues implicated in PAM recognition. The left panel illustrates the proximity of D1135 to S1136, a residue that makes a water-mediated, minor groove contact to the 3rd base position of the PAM15. The right panel illustrates the proximity of G1218, E1219, and T1337 to R1335, a residue that makes a direct, base-specific major groove contact to the 3rd base position of the PAM15. Angstrom distances indicated by dashed lines; non-target strand guanine bases dG2 and dG3 of the PAM; other DNA bases; water molecules; images generated using PyMOL from PDB:4UN3. B, Mutational analysis of six residues in SpCas9 that are implicated in PAM recognition. Clones containing one of three types of mutations at each position were tested for EGFP disruption with two sgRNAs targeted to sites harboring NGG PAMs. For each position, we created an alanine substitution and two non-conservative mutations. S1136 and R1335 were previously reported to mediate contacts to the 3rd guanine of the PAM15, and D1135, G1218, E1219, and T1337 are reported in this study. EGFP disruption activities are quantified by flow cytometry; background control represented by the dashed line; error bars represent s.e.m., n=3.

[0043] FIGS. 21A-F Selection and assembly of SaCas9 variants with altered PAM specificities (A) Phylogenetic tree of Cas9 orthologues with SpCas9 and SaCas9 highlighted. (B) Activity of SaCas9 variants with single amino acid substitutions assessed in the bacterial positive selection assay (see also FIG. 31B). Error bars represent s.e.m., n=3; NS=no survival. (C) Human cell activity of wild-type and R1015H SaCas9 (SEQ ID NOS 41, 511, 5 and 513, respectively, in order of appearance). EGFP disruption activity quantified by flow cytometry; error bars represent s.e.m, n=3, mean level of background EGFP loss represented by dashed line (for this and panel E). (D) Total number of substitutions observed at each amino acid position when selecting for SaCas9 variants with altered PAM specificities (SEQ ID NOS 43 and 47, respectively, in order of appearance). Starter mutations at R1015 are not counted. (E) Human cell EGFP disruption activity of variants containing mutations observed when selecting for altered PAM specificities (SEQ ID NOS 41, 5, 42, 4 and 511, 513, 512 and 514, respectively, in order of appearance). (F) Mean post-selection PAM depletion value (PPDV) scatterplot of wild-type SaCas9 versus the KKH variant (n=2, see also FIG. 34C) (SEQ ID NOS 43, 47, 46, 48, 514, 513, 6, 4, 42, 512, 5, 41 and 511, respectively, in order of appearance). Two libraries with different protospacers and 8 randomized basepairs in place of the PAM were used to determine which PAMs are targetable by each Cas9. Statistically significant depletion indicated by the dashed line (relative to a dCas9 control, see FIGS. 34A and 34B), and 5-fold depletion by the grey dashed line.

[0044] FIGS. 22A-F. Activity of the SaCas9 KKH variant targeted to endogenous sites in human cells (A) Mutagenesis frequencies across 55 different sites bearing NNNRRT PAMs (SEQ ID NOS 43, 47, 46 and 48, respectively, in order of appearance) induced by KKH SaCas9, determined by T7E1 assay. Error bars represent s.e.m., n=3, ND, not detectable by T7E1 assay. (B) KKH variant preference for the third position of the PAM. Mean activities from data in panel A are shown for this and panels B and C. (C) KKH variant preference for the fourth and fifth positions of the PAM. (D) Spacer length preference of the KKH SaCas9 variant. (E) Comparison of the human cell EGFP disruption activity of wild-type and KKH SaCas9 targeted to various sites containing NNNRRT PAMs (SEQ ID NOS 43, 47, 46 and 48, respectively, in order of appearance). EGFP disruption quantified by flow cytometry; error bars represent s.e.m, n=3, mean level of background EGFP loss represented by dashed line. (F) Mutagenesis frequencies of wild-type SaCas9 against one site for each of the 16 possible NNNRRT sites from panel A (sites with the highest KKH activity were selected). Error bars represent s.e.m., n=3, ND, not detectable by T7E1 assay.

[0045] FIGS. 23A-E Genome-wide specificity profiles of wild-type and KKH SaCas9 (A) and (B) Direct comparison of wild-type and KKH SaCas9 targeted to sites containing NNGRRT (SEQ ID NO:46) PAMs, represented by total number of off-targets (panel A) and mismatches observed at each off-target site (panel B) at EMX site 6 (SEQ ID NO:158 and variants disclosed as SEQ ID NOS 874-876, respectively, in order of appearance) and VEGF site 8 (SEQ ID NO:159 and variants disclosed as SEQ ID NOS 891-925, respectively, in order of appearance). FANCF site 10 wildtype and variants disclosed as SEQ ID NOS 877 and 878; FANCF site 13 wildtype and variants disclosed as SEQ ID NOS 879-883; RUNX1 site 13 wildtype and variants disclosed as SEQ ID NOS 884-887; and RUNX1 site 14 variants disclosed as SEQ ID NOS 888-890, all respectively, in order of appearance). For panels B and E, GUIDE-seq read counts at each site are indicated; on-target sequences are marked with a black box; mismatched positions within off-target sites are highlighted; sequences have been corrected for cell-type specific SNPs; sites with potential sgRNA or DNA bulge nucleotides are indicated by a small-bordered base or a dash, respectively. (C) Venn diagram highlighting the differences in off-target site cleavage by wild-type and KKH SaCas9 at VEGFA site 8. (D) and (E) Specificity profile of the KKH variant targeted to sites containing NNHRRT (SEQ ID NO:44) PAMs, EMX site 1 (SEQ ID NO:160 and variants disclosed as SEQ ID NOS 926-941, respectively, in order of appearance), EMX site 4 (SEQ ID NO:161 and variants disclosed as SEQ ID NOS 942-951, respectively, in order of appearance), EMX site 10 (SEQ ID NO: 162 and variants disclosed as SEQ ID NOS 952-957, respectively, in order of appearance), FANCF site 9 (SEQ ID NO:163 and variants disclosed as SEQ ID NOS 958-962, respectively, in order of appearance), and FANCF site 16 (SEQ ID NO:164 and variant disclosed as SEQ ID NO: 963), represented by total number of off-targets (panel D) and mismatches observed at each off-target site (panel E).

[0046] FIG. 24: Activity of VQR-derivative clones in the bacterial 2-plasmid screen. Testing of 24 different VQR derivative variants against sites in bacteria that contain NGAN PAMs. Survival on the selective plate, relative to the non-selective plate, is indicative of activity against the indicated PAM.

[0047] FIG. 25: Human cell EGFP disruption activity of SpCas9-VQR derivatives. EGFP disruption activity of the SpCas9 variants is a measure of activity against sites that contain the indicated PAM.

[0048] FIG. 26: Human cell EGFP disruption activity of SpCas9-VQR and -VRQR variants. EGFP disruption activity of the SpCas9 variants is a measure of activity against sites that contain the indicated PAM.

[0049] FIG. 27: Activity of SpCas9-VRQR derivate variants in the bacterial 2-plasmid screen. Testing of 12 different VQR derivative variants against sites in bacteria that contain NGAN PAMs, compared to the VQR and VRQR variants. Survival on the selective plate, relative to the non-selective plate, is indicative of activity against the indicated PAM.

[0050] FIG. 28: Human cell EGFP disruption activity of SpCas9-VRQR variants. EGFP disruption activity of the SpCas9 variants is a measure of activity against sites that contain the indicated PAM.

[0051] FIG. 29 Protein domain alignment of Cas9 orthologues (from FIG. 21A). The domain structure of SpCas9 is shown at the top (based on PDB:4UN3; Anders et al., 2014); the PAM contacting residues of SpCas9 are highlighted; the region of SaCas9 mutagenized to select for altered PAM specificity variants is shown.

[0052] FIGS. 30A-B Primary sequence alignment of Cas9 orthologues for identification of PAM-interacting residues; SEQ ID NOs:165-176, respectively. SpCas9 residues previously identified (Anders et al., 2014; Examples 1-2) to be important for contacting the PAM are highlighted, residues capable of modulating SaCas9 PAM specificity (identified in this study) are highlighted, and positively charged residues adjacent to R1015 are highlighted. The structurally predicted PAM-interacting domain of SpCas9 is highlighted dashed line (based on PDB:4UN3; Anders et al., 2014), and the conservative estimate of the SaCas9 PAM-interacting domain used as a boundary for PCR mutagenesis is indicated with a dashed line.

[0053] FIGS. 31A-B Schematic of the bacterial positive selection assay (A) The selection plasmids can be modified to screen for Cas9 variants that are able to recognize alternative PAM sequences (SEQ ID NO: 1020). (B) Schematic of the positive selection plasmids (left panel) and expected outcomes (right panel) when screening functional or non-functional Cas9/sgRNA pairs in the positive selection (SEQ ID NO: 1021).

[0054] FIG. 32 Addition of the K929R mutation to the KNH and KKH variants (SEQ ID NOS 41-42, 511-512, 5, 4 and 513-514, respectively, in order of appearance). EGFP disruption activity quantified by flow cytometry; error bars represent s.e.m, n=3, mean level of background EGFP loss represented by the dashed line.

[0055] FIG. 33 Schematic of the bacterial site-depletion assay. Site-depletion plasmids with 8 randomized nucleotides in place of the PAM that are refractory to cleavage by wild-type or KKH SaCas9 are sequenced. Library 1 Spacer sequence, SEQ ID NO:964; library 2 spacer sequence, SEQ ID NO: 965.Targetable PAMs are inferred by their depletion relative to the input library, calculated as the post-selection PAM depletion value (PPDV).

[0056] FIGS. 34A-E Site-depletion assay results for wild-type and KKH SaCas9 (A) PPDV values for dCas9 control experiments on both libraries. The dashed line indicates statistical significance (PPDV=0.794, see panel B); grey dashed line indicates 5-fold depletion; PPDVs for a window comprising the 3^{rd}/4^{th}/5^{th}/6^{th} positions of the PAM are plotted (for this and panel C). (B) Statistically significant post-selection PAM depletion values (PPDVs) were determined from the dCas9 control experiments in panel A. Statistical significance was determined by setting the threshold at 3.36 times the standard deviation. (C) Comparison of the PPDVs for wild-type and KKH SaCas9 for each of the two libraries containing 8 randomized nucleotides in place of the PAM. Library 1 discloses SEQ ID NOS 514, 513, 6, 4, 42, 512, 5, 511 and 41, and Library 2 discloses SEQ ID NOS 513-514, 5-6, 4, 42, 41 and 511-512, respectively, in order of appearance. (D) and (E) PAMs and corresponding PPDV values for all PAMs depleted greater than 5-fold for wild-type and KKH SaCas9, respectively. Sequence motifs are shown for PAMs in two categories: 1) greater than 10 fold or 2) 5- to 10-fold depleted.

[0057] FIGS. 35A-D Additional characteristics of endogenous sites targeted by KKH SaCas9 (A) Activity for each of the 55 endogenous site sgRNAs, binned based on the 16 possible NRR motifs of an NNNRRT PAM. Mean activities from FIG. 2A are shown for this and panels B and C. (B) and (C) Relationship between endogenous gene disruption activity and GC content of the spacer and PAM, respectively. (D) Sequence logos for the spacer and PAM of target sites binned based on activity. Sites were grouped based on mean mutation frequency (from FIG. 2A) into low (0-10%, 17 sites), medium (10-30%, 17 sites), or high (>30%, 21 sites) activity.

[0058] FIGS. 36A-B On-target tag integration and mutagenesis frequencies for GUIDE-seq experiments (A) Restriction fragment length polymorphism (RFLP) analysis to determine the mean GUIDE-seq tag integration frequencies. Error bars represent s.e.m., n=3 (for this and panel B). (B) Mean mutagenesis detected by T7E1 assay.

[0059] FIGS. 37A-B A truncated repeat:anti-repeat sgRNA outperforms the full length sgRNA, similar to previous results (Ran et al., 2015) (A) Human cell EGFP disruption activity for wild-type SaCas9 against 4 sites that contain NNGRRT (SEQ ID NO:46) PAMs (SEQ ID NOS 4, 5 and 4, respectively, in order of appearance). EGFP disruption activity quantified by flow cytometry; error bars represent s.e.m, n=3, mean level of background EGFP loss represented by dashed line (for this and panel B). (B) Human cell EGFP disruption activity for KKH SaCas9 against 8 sites that contain NNNRRT PAMs (SEQ ID NOS 41-42, 511-512, 5, 4 and 513-514, respectively, in order of appearance).

### DETAILED DESCRIPTION

[0060] Although CRISPR-Cas9 nucleases are widely used for genome editing¹⁴, the range of sequences that Cas9 can cleave is constrained by the need for a specific protospacer adjacent motif (PAM) in the target site^{5, 6}. For example, SpCas9, the most robust and widely used Cas9 to date, primarily recognizes NGG PAMs. As a result, it can often be difficult to target double-stranded breaks (DSBs) with the precision that is necessary for various genome editing applications. In addition, imperfect PAM recognition by Cas9 can lead to the creation of unwanted off-target mutations^{7, 8}. The ability to evolve Cas9 derivatives with purposefully altered or improved PAM specificities would address these limitations but, to the present inventors' knowledge, no such Cas9 variants have been described.

[0061] A potential strategy for improving the targeting range of orthogonal Cas9s that recognize extended PAMs is to alter their PAM recognition specificities. As described herein, PAM recognition specificity of SpCas9 can be altered using a combination of structure-guided design and directed evolution performed with a bacterial cell-based selection system; see Examples 1 and 2. Also described herein are variants that have been evolved to have relaxed or partially relaxed specificities for certain positions within the PAM; see Example 3. These variants expand the utility of Cas9 orthologues that specify longer PAM sequences.

[0062] Engineered Cas9 Variants with Altered PAM Specificity

[0063] The SpCas9 variants engineered in this study greatly increase the sites accessible by wild-type SpCas9, further enhancing the opportunities to use the CRISPR-Cas9 platform to practice efficient HDR, to target NHEJ-mediated indels to small genetic elements, and to exploit the requirement for a PAM to distinguish between two different alleles in the same cell. The altered PAM specificity SpCas9 variants can efficiently disrupt endogenous gene sites that are not currently targetable by SpCas9 in both zebrafish embryos and human cells, suggesting that they will work in a variety of different cell types and organisms. Importantly, GUIDE-seq experiments show that the global profiles of the VQR and VRER SpCas9 variants are similar to or better than those observed with wild-type SpCas9. In addition, the improved specificity D1135E variant that we identified and characterized provides a superior alternative to the widely used wild-type SpCas9. D1135E has similar activity to wild-type SpCas9 on sites with canonical NGG PAMs but reduces genome-wide cleavage of off-target sites bearing mismatched spacer sequences and either canonical or non-canonical PAMs.

[0064] All of the SpCas9 and SaCas9 variants described herein can be rapidly incorporated into existing and widely used vectors, e.g., by simple site-directed mutagenesis, and because they require only a small number of mutations contained within the PAM-interacting domain, the variants should also work with other previously described improvements to the SpCas9 platform (e.g., truncated sgRNAs (Tsai et al., Nat Biotechnol 33, 187-197 (2015); Fu et al., Nat Biotechnol 32, 279-284 (2014)), nickase mutations (Mali et al., Nat Biotechnol 31, 833-838 (2013); Ran et al., Cell 154, 1380-1389 (2013)), dimeric FokI-dCas9 fusions (Guilinger et al., Nat Biotechnol 32, 577-582 (2014); Tsai et al., Nat Biotechnol 32, 569-576 (2014)).

[0065] Beyond the mutations to R1335 that presumably contact the 3^{rd} PAM base position, the SpCas9 variants evolved in this study bear amino acid substitutions at D1135, G1218, and T1337, all of which are located near or adjacent to residues that make direct or indirect contacts to the 3^{rd} PAM position in the SpCas9-PAM structure but do not themselves mediate contacts with the PAM bases (Anders et al., Nature 513, 569-573 (2014)) (FIG. 20A). Consistent with this, we found that various mutations at these positions do not appear to affect SpCas9-mediated cleavage of sites bearing an NGG PAM (FIG. 20B). These results, together with the nature of the amino acid substitutions at G1218 and T1337 in the VQR and VRER SpCas9 variants, suggest that alterations at these two positions may be gain-of-function mutations. For example, it is possible that the T1337R mutation is forming backbone or base-specific contacts near or to the 4^{th} position of the PAM, particularly in the case of the VRER variant. The mechanistic role of mutations at D1135 remain less clear but they may perhaps influence the activity of the adjacent S1136 residue, which has been implicated in making a water-mediated contact through the minor groove to the guanine in the third position of the PAM (Anders et al., Nature 513, 569-573 (2014)). The D1135E mutation might improve specificity by disrupting this network, perhaps reducing the overall interaction energy of the SpCas9/gRNA complex with the target site, a mechanism we have previously proposed might reduce off-target effects by making cleavage of these unwanted sequences less energetically favorable (Fu et al., Nat Biotechnol 32, 279-284 (2014)).

[0066] The present results clearly establish the feasibility of engineering Cas9 nucleases with altered PAM specificities. Characterization of additional Cas9 orthologues (Esvelt et al., Nat Methods 10, 1116-1121 (2013); Fonfara et al., Nucleic Acids Res 42, 2577-2590 (2014)) or generation of domain-swapped Cas9 chimeras (Nishimasu et al., Cell. 156(5):935-49 (2014)) as previously described also provide potential avenues for targeting different PAMs. The engineering strategy delineated herein can also be performed with such orthologues or synthetic hybrid Cas9s to further diversify the range of targetable PAMs. St1Cas9 and SaCas9 make particularly attractive frameworks for future engineering efforts given their smaller sizes relative to SpCas9 and our demonstration of their robust genome editing activities in our bacterial selection systems and in human cells.

[0067] Our results strongly suggested that R1015 in wild-type SaCas9 contacts the G in the third PAM position. Without wishing to be bound by theory, the R1015H substitution may remove this contact and relax specificity at the third position; however, loss of the R1015 to G contact could also conceivably reduce the energy associated with target site binding, which may explain why the R1015H mutation alone is not sufficient for robust activity at NNNRRT sites in human cells. Because the E782K and N968K substitutions both add positive charge, it is possible that they may make non-specific interactions with the DNA phosphate backbone to compensate energetically for the loss of the R1015 to guanine contact.

[0068] The genetic approach described here does not require structural information and therefore should be applicable to many other Cas9 orthologues. The only requirement to evolve Cas9 nucleases with broadened PAM specificities is that they function in a bacterial-based selection. While previous studies demonstrated that PAM recognition can be altered by swapping the PAM-interacting domains of highly related Cas9 orthologues (Nishimasu et al., Cell (2014)), it remains to be determined whether this strategy is generalizable or effective when using more divergent orthologues. By contrast, the evolution strategies we have described herein can be used engineer PAM recognition specificities beyond those encoded within naturally occurring Cas9 orthologues. This overall strategy can be employed to expand the targeting range and extend the utility of the numerous Cas9 orthologues that exist in nature.

[0069] SpCas9 Variants with Altered Specificity

[0070] Thus, provided herein are spCas9 variants. The SpCas9 wild type sequence is as follows:

```
(SEQ ID NO: 1)
                10 20 30
MDKKYSIGLD IGTNSVGWAV ITDEYKVPSK
                40 50 60
KFKVLGNTDR HSIKKNLIGA LLEDSGETAE
                70 80 90
ATRLKRTARR RYTRRKNRIC YLQEIFSNEM
              100 110 120
AKVDDSFFHR LEESELVEED KKHERHPIFG
              130 140 150
NIVDEVAYHE KYPTIYHLRK KLVDSTDKAD
              160 170 180
LRLIYLALAH MIKFRGHFLI EGDLNPDNSD
              190 200 210
VDKLFIQLVQ TYNQLFEENP INASGVDAKA
              220 230 240
ILSARLSKSR RLENLIAQLP GEKKNGLFGN
              250 260 270
LIALSLGLTP NEKSNEDLAE DAKLQLSKDT
              280 290 300
YDDDLDNLLA QIGDQYADLE LAAKNLSDAI
              310 320 330
LLSDILRVNT EITKAPLSAS MIKRYDEHHQ
              340 350 360
DLTLLKALVR QQLPEKYKEI FFDQSKNGYA
              370 380 390
GYIDGGASQE EFYKFIKPIL EKMDGTEELL
              400 410 420
VKLNREDLLR KQRTEDNGSI PHQIHLGELH
              430 440 450
AILRRQEDFY PFLKDNREKI EKILTFRIPY
              460 470 480
YVGPLARGNS RFAWMTRKSE ETITPWNFEE
              490 500 510
VVDKGASAQS FIERMTNEDK NLPNEKVLPK
              520 530 540
HSLLYEYETV YNELTKVKYV TEGMRKPAFL
              550 560 570
SGEQKKAIVD LLFKTNRKVT VKQLKEDYFK
              580 590 600
KIECFDSVEI SGVEDRENAS LGTYHDLLKI
              610 620 630
IKDKDELDNE ENEDILEDIV LTLTLFEDRE
              640 650 660
MIEERLKTYA HLEDDKVMKQ LKRRRYTGWG
              670 680 690
RLSRKLINGI RDKQSGKTIL DELKSDGFAN
              700 710 720
RNFMQLIHDD SLTFKEDIQK AQVSGQGDSL
              730 740 750
HEHIANLAGS PAIKKGILQT VKVVDELVKV
              760 770 780
MGRHKPENIV IEMARENQTT QKGQKNSRER
              790 800 810
MKRIEEGIKE LGSQILKEHP VENTQLQNEK
              820 830 840
LYLYYLQNGR DMYVDQELDI NRLSDYDVDH
              850 860 870
IVPQSFLKDD SIDNKVLTRS DKNRGKSDNV
              880 890 900
PSEEVVKKMK NYWRQLLNAK LITQRKEDNL
              910 920 930
TKAERGGLSE LDKAGFIKRQ LVETRQITKH
              940 950 960
VAQILDSRMN TKYDENDKLI REVKVITLKS
              970 980 990
KLVSDERKDF QFYKVREINN YHHAHDAYLN
            1000 1010 1020
AVVGTALIKK YPKLESEFVY GDYKVYDVRK
            1030 1040 1050
MIAKSEQEIG KATAKYFFYS NIMNFFKTEI
            1060 1070 1080
TLANGEIRKR PLIETNGETG EIVWDKGRDE
            1090 1100 1110
ATVRKVLSMP QVNIVKKTEV QTGGFSKESI
            1120 1130 1140
LPKRNSDKLI ARKKDWDPKK YGGEDSPTVA
            1150 1160 1170
YSVLVVAKVE KGKSKKLKSV KELLGITIME
            1180 1190 1200
RSSFEKNPID FLEAKGYKEV KKDLIIKLPK
            1210 1220 1230
YSLFELENGR KRMLASAGEL QKGNELALPS
            1240 1250 1260
KYVNFLYLAS HYEKLKGSPE DNEQKQLFVE
            1270 1280 1290
QHKHYLDEII EQISEFSKRV ILADANLDKV
            1300 1310 1320
LSAYNKHRDK PIREQAENII HLFTLTNLGA
            1330 1340 1350
PAAFKYFDTT IDRKRYTSTK EVLDATLIHQ
            1360
SITGLYETRI DLSQLGGD
```

[0071] The SpCas9 variants described herein can include mutations at one or more of the following positions: D1135, G1218, R1335, T1337 (or at positions analogous thereto). In some embodiments, the SpCas9 variants include one or more of the following mutations: D1135V; D1135E; G1218R; R1335E; R1335Q; and T1337R. In some embodiments, the SpCas9 variants are at least 80%, e.g., at least 85%, 90%, or 95% identical to the amino acid sequence of SEQ ID NO:1, e.g., have differences at up to 5%, 10%, 15%, or 20% of the residues of SEQ ID NO:1 replaced, e.g., with conservative mutations. In preferred embodiments, the variant retains desired activity of the parent, e.g., the nuclease activity (except where the parent is a nickase or a dead Cas9), and/or the ability to interact with a guide RNA and target DNA).

[0072] To determine the percent identity of two nucleic acid sequences, the sequences are aligned for optimal comparison purposes (e.g., gaps can be introduced in one or both of a first and a second amino acid or nucleic acid sequence for optimal alignment and non-homologous sequences can be disregarded for comparison purposes). The length of a reference sequence aligned for comparison purposes is at least 80% of the length of the reference sequence, and in some embodiments is at least 90% or 100%. The nucleotides at corresponding amino acid positions or nucleotide positions are then compared. When a position in the first sequence is occupied by the same nucleotide as the corresponding position in the second sequence, then the molecules are identical at that position (as used herein nucleic acid “identity” is equivalent to nucleic acid “homology”). The percent identity between the two sequences is a function of the number of identical positions shared by the sequences, taking into account the number of gaps, and the length of each gap, which need to be introduced for optimal alignment of the two sequences. Percent identity between two polypeptides or nucleic acid sequences is determined in various ways that are within the skill in the art, for instance, using publicly available computer software such as Smith Waterman Alignment (Smith, T. F. and M. S. Waterman (1981) J Mol Biol 147:195-7); “BestFit” (Smith and Waterman, Advances in Applied Mathematics, 482-489 (1981)) as incorporated into GeneMatcher Plus™, Schwarz and Dayhof (1979) Atlas of Protein Sequence and Structure, Dayhof, M.O., Ed, pp 353-358; BLAST program (Basic Local Alignment Search Tool; (Altschul, S. F., W. Gish, et al. (1990) J Mol Biol 215: 403-10), BLAST-2, BLAST-P, BLAST-N, BLAST-X, WU-BLAST-2, ALIGN, ALIGN-2, CLUSTAL, or Megalign (DNASTAR) software. In addition, those skilled in the art can determine appropriate parameters for measuring alignment, including any algorithms needed to achieve maximal alignment over the length of the sequences being compared. In general, for proteins or nucleic acids, the length of comparison can be any length, up to and including full length (e.g., 5%, 10%, 20%, 30%, 40%, 50%, 60%, 70%, 80%, 90%, 95%, or 100%). For purposes of the present compositions and methods, at least 80% of the full length of the sequence is aligned using the BLAST algorithm and the default parameters.

[0073] For purposes of the present invention, the comparison of sequences and determination of percent identity between two sequences can be accomplished using a Blossum 62 scoring matrix with a gap penalty of 12, a gap extend penalty of 4, and a frameshift gap penalty of 5.

[0074] Conservative substitutions typically include substitutions within the following groups: glycine, alanine; valine, isoleucine, leucine; aspartic acid, glutamic acid, asparagine, glutamine; serine, threonine; lysine, arginine; and phenylalanine, tyrosine.

[0075] In some embodiments, the SpCas9 variants include one of the following sets of mutations: D1135V/R1335Q/T1337R (VQR variant); D1135V/G1218R/R1335Q/T1337R (VRQR variant); D1135E/R1335Q/T1337R (EQR variant); or D1135V/G1218R/R1335E/T1337R (VRER variant).

[0076] In some embodiments, the SpCas9 variants also include one of the following mutations, which reduce or destroy the nuclease activity of the Cas9: D10, E762, D839, H983, or D986 and H840 or N863, e.g., D10A/D10N and H840A/H840N/H840Y, to render the nuclease portion of the protein catalytically inactive; substitutions at these positions could be alanine (as they are in Nishimasu al., Cell 156, 935-949 (2014)), or other residues, e.g., glutamine, asparagine, tyrosine, serine, or aspartate, e.g., E762Q, H983N, H983Y, D986N, N863D, N863S, or N863H (see WO 2014/152432). In some embodiments, the variant includes mutations at D10A or H840A (which creates a single-strand nickase), or mutations at D10A and H840A (which abrogates nuclease activity; this mutant is known as dead Cas9 or dCas9).

[0077] Also provided herein are SaCas9 variants. The SaCas9 wild type sequence is as follows:

```
(SEQ ID NO: 2)
                10 20 30 40 50
MKRNYILGLD IGITSVGYGI IDYETRDVID AGVRLFKEAN VENNEGRRSK
                60 70 80 90 100
RGARRLKRRR RHRIQRVKKL LFDYNLLTDH SELSGINPYE ARVKGLSQKL
              110 120 130 140 150
SEEEFSAALL HLAKRRGVHN VNEVEEDTGN ELSTKEQISR NSKALEEKYV
              160 170 180 190 200
AELQLERLKK DGEVRGSINR FKTSDYVKEA KQLLKVQKAY HQLDQSFIDT
              210 220 230 240 250
YIDLLETRRT YYEGPGEGSP FGWKDIKEWY EMLMGHCTYF PEELRSVKYA
              260 270 280 290 300
YNADLYNALN DLNNLVITRD ENEKLEYYEK FQIIENVFKQ KKKPTLKQIA
              310 320 330 340 350
KEILVNEEDI KGYRVTSTGK PEFTNLKVYH DIKDITARKE IIENAELLDQ
              360 370 380 390 400
IAKILTIYQS SEDIQEELTN LNSELTQEEI EQISNLKGYT GTHNLSLKAI
              410 420 430 440 450
NLILDELWHT NDNQIAIFNR LKLVPKKVDL SQQKEIPTTL VDDFILSPVV
              460 470 480 490 500
KRSFIQSIKV INAIIKKYGL PNDIIIELAR EKNSKDAQKM INEMQKRNRQ
              510 520 530 540 550
TNERIEEIIR TTGKENAKYL IEKIKLHDMQ EGKCLYSLEA IPLEDLLNNP
              560 570 580 590 600
FNYEVDHIIP RSVSFDNSEN NKVLVKQEEN SKKGNRTPFQ YLSSSDSKIS
              610 620 630 640 650
YETFKKHILN LAKGKGRISK TKKEYLLEER DINRFSVQKD FINRNLVDTR
              660 670 680 690 700
YATRGLMNLL RSYFRVNNLD VKVKSINGGF TSFLRRKWKF KKERNKGYKH
              710 720 730 740 750
HAEDALIIAN ADFIFKEWKK LDKAKKVMEN QMFEEKQAES MPEIETEQEY
              760 770 780 790 800
KEIFITPHQI KHIKDFKDYK YSHRVDKKPN RELINDTLYS TRKDDKGNTL
              810 820 830 840 850
IVNNLNGLYD KDNDKLKKLI NKSPEKLLMY HHDPQTYQKL KLIMEQYGDE
              860 870 880 890 900
KNPLYKYYEE TGNYLTKYSK KDNGPVIKKI KYYGNKLNAH LDITDDYPNS
              910 920 930 940 950
RNKVVKLSLK PYRFDVYLDN GVYKFVTVKN LDVIKKENYY EVNSKCYEEA
              960 970 980 990 1000
KKLKKISNQA EFIASFYNND LIKINGELYR VIGVNNDLLN RIEVNMIDIT
            1010 1020 1030 1040 1050
YREYLENMND KRPPRIIKTI ASKTQSIKKY STDILGNLYE VKSKKHPQII
KKG
```

[0078] The SaCas9 variants described herein include mutations at one or more of the following positions: E782, N968, and/or R1015 (or at positions analogous thereto). In some embodiments, the variants include one or more of the following mutations: R1015Q, R1015H, E782K, N968K, E735K, K929R, A1021T, K1044N. In some embodiments, the SaCas9 variants include mutations E782K, K929R, N968K, and R1015X, wherein X is any amino acid other than R. In some embodiments, the SaCas9 variants are at least 80%, e.g., at least 85%, 90%, or 95% identical to the amino acid sequence of SEQ ID NO:2, e.g., have differences at up to 5%, 10%, 15%, or 20% of the residues of SEQ ID NO:2 replaced, e.g., with conservative mutations. In preferred embodiments, the variant retains desired activity of the parent, e.g., the nuclease activity (except where the parent is a nickase or a dead Cas9), and/or the ability to interact with a guide RNA and target DNA).

[0079] In some embodiments, the SaCas9 variants also include one of the following mutations, which may reduce or destroy the nuclease activity of the SaCas9: D10A, D556A, H557A, N580A, e.g., D10A/H557A and/or D10A/D556A/H557A/N580A, to render the nuclease portion of the protein catalytically inactive; substitutions at these positions could be alanine (as they are in Nishimasu al., Cell 156, 935-949 (2014)), or other residues, e.g., glutamine, asparagine, tyrosine, serine, or aspartate. In some embodiments, the variant includes mutations at D10A, D556A, H557A, or N580A (which may create a single-strand nickase), or mutations at D10A/H557A and/or D10A/D556A/H557A/N580A may (which may abrogate nuclease activity by analogy to SpCas9; these are referred to as dead Cas9 or dCas9).

[0080] Also provided herein are isolated nucleic acids encoding the SpCas9 and/or SaCas9 variants, vectors comprising the isolated nucleic acids, optionally operably linked to one or more regulatory domains for expressing the variant proteins, and host cells, e.g., mammalian host cells, comprising the nucleic acids, and optionally expressing the variant proteins.

[0081] The variants described herein can be used for altering the genome of a cell; the methods generally include expressing the variant proteins in the cells, along with a guide RNA having a region complementary to a selected portion of the genome of the cell. Methods for selectively altering the genome of a cell are known in the art, see, e.g., U.S. Pat. No. 8,697,359; US2010/0076057; US2011/0189776; US2011/0223638; US2013/0130248; WO/2008/108989; WO/2010/054108; WO/2012/164565; WO/2013/098244; WO/2013/176772; US20150050699; US20150045546; US20150031134; US20150024500; US20140377868; US20140357530; US20140349400; US20140335620; US20140335063; US20140315985; US20140310830; US20140310828; US20140309487; US20140304853; US20140298547; US20140295556; US20140294773; US20140287938; US20140273234; US20140273232; US20140273231; US20140273230; US20140271987; US20140256046; US20140248702; US20140242702; US20140242700; US20140242699; US20140242664; US20140234972; US20140227787; US20140212869; US20140201857; US20140199767; US20140189896; US20140186958; US20140186919; US20140186843; US20140179770; US20140179006; US20140170753; Makarova et al., “Evolution and classification of the CRISPR-Cas systems” 9(6) Nature Reviews Microbiology 467-477 (1-23) (June 2011); Wiedenheft et al., “RNA-guided genetic silencing systems in bacteria and archaea” 482 Nature 331-338 (Feb. 16, 2012); Gasiunas et al., “Cas9-crRNA ribonucleoprotein complex mediates specific DNA cleavage for adaptive immunity in bacteria” 109(39) Proceedings of the National Academy of Sciences USA E2579-E2586 (Sep. 4, 2012); Jinek et al., “A Programmable Dual-RNA-Guided DNA Endonuclease in Adaptive Bacterial Immunity” 337 Science 816-821 (Aug. 17, 2012); Carroll, “A CRISPR Approach to Gene Targeting” 20(9) Molecular Therapy 1658-1660 (September 2012); U.S. Appl. No. 61/652,086, filed May 25, 2012; A1-Attar et al., Clustered Regularly Interspaced Short Palindromic Repeats (CRISPRs): The Hallmark of an Ingenious Antiviral Defense Mechanism in Prokaryotes, Biol Chem. (2011) vol. 392, Issue 4, pp. 277-289; Hale et al., Essential Features and Rational Design of CRISPR RNAs That Function With the Cas RAMP Module Complex to Cleave RNAs, Molecular Cell, (2012) vol. 45, Issue 3, 292-302.

[0082] The variant proteins described herein can be used in place of the SpCas9 proteins described in the foregoing references with guide RNAs that target sequences that have PAM sequences according to the following Table 4.

TABLE 4

| Variant protein | Stronger PAM | Weaker PAM |
|---|---|---|
| SpCas9-D1135E | NGG | NAG, NGA, |
| | | and NNGG |
| SpCas9-VQR | NGAN and | NGGG, NGTG, |
| | NGCG | and NAAG |
| SpCas9-VRQR | NGAN | |
| SpCas9-EQR | NGAG | NGAT, NGAA, |
| | | and NGCG |
| SpCas9-VRER | NGCG | NGCA, NGCC, |
| | | and NGCT |
| SaCas9-KKH | NNNRRT | |
| SaCas9-KKQ | NNRRRT | NNNRRT |
| | (SEQ ID NO: 45) | |
| SaCas9-KKE | NNCRRT | NNNRRT |
| | (SEQ ID NO: 47) | |
| SaCas9- | NNTRRT | NNNRRT |
| (KKL or KKM) | (SEQ ID NO: 48) | |

[0083] In addition, the variants described herein can be used in fusion proteins in place of the wild-type Cas9 or other Cas9 mutations (such as the dCas9 or Cas9 nickase described above) as known in the art, e.g., a fusion protein with a heterologous functional domains as described in WO 2014/124284. For example, the variants, preferably comprising one or more nuclease-reducing or killing mutation, can be fused on the N or C terminus of the Cas9 to a transcriptional activation domain or other heterologous functional domains (e.g., transcriptional repressors (e.g., KRAB, ERD, SID, and others, e.g., amino acids 473-530 of the ets2 repressor factor (ERF) repressor domain (ERD), amino acids 1-97 of the KRAB domain of KOXI, or amino acids 1-36 of the Mad mSIN3 interaction domain (SID); see Beerli et al., PNAS USA 95:14628-14633 (1998)) or silencers such as Heterochromatin Protein 1 (HP1, also known as swi6), e.g., HPla or HP10; proteins or peptides that could recruit long non-coding RNAs (lncRNAs) fused to a fixed RNA binding sequence such as those bound by the MS2 coat protein, endoribonuclease Csy4, or the lambda N protein; enzymes that modify the methylation state of DNA (e.g., DNA methyltransferase (DNMT) or TET proteins); or enzymes that modify histone subunits (e.g., histone acetyltransferases (HAT), histone deacetylases (HDAC), histone methyltransferases (e.g., for methylation of lysine or arginine residues) or histone demethylases (e.g., for demethylation of lysine or arginine residues)) as are known in the art can also be used. A number of sequences for such domains are known in the art, e.g., a domain that catalyzes hydroxylation of methylated cytosines in DNA. Exemplary proteins include the Ten-Eleven-Translocation (TET)1-3 family, enzymes that converts 5-methylcytosine (5-mC) to 5-hydroxymethylcytosine (5-hmC) in DNA.

[0084] Sequences for human TET1-3 are known in the art and are shown in the following table:

GenBank Accession Nos.

| Gene | Amino Acid | Nucleic Acid |
|---|---|---|
| TET1 | NP_085128.2 | NM_030625.2 |
| TET2* | NP_001120680.1 (var 1) | NM_001127208.2 |
| | NP_060098.3 (var 2) | NM_017628.4 |
| TET3 | NP_659430.1 | NM_144993.1 |

*Variant (1) represents the longer transcript and encodes the longer isoform (a).
Variant (2) differs in the 5′ UTR and in the 3′ UTR and coding sequence compared to variant 1.
The resulting isoform (b) is shorter and has a distinct C-terminus compared to isoform a.

[0085] In some embodiments, all or part of the full-length sequence of the catalytic domain can be included, e.g., a catalytic module comprising the cysteine-rich extension and the 2OGFeDO domain encoded by 7 highly conserved exons, e.g., the Tet1 catalytic domain comprising amino acids 1580-2052, Tet2 comprising amino acids 1290-1905 and Tet3 comprising amino acids 966-1678. See, e.g., FIG. 1 of Iyer et al., Cell Cycle. 2009 Jun. 1; 8(11):1698-710. Epub 2009 Jun. 27, for an alignment illustrating the key catalytic residues in all three Tet proteins, and the supplementary materials thereof for full length sequences (see, e.g., seq 2c); in some embodiments, the sequence includes amino acids 1418-2136 of Tet1 or the corresponding region in Tet2/3.

[0086] Other catalytic modules can be from the proteins identified in Iyer et al., 2009.

[0087] In some embodiments, the heterologous functional domain is a biological tether, and comprises all or part of (e.g., DNA binding domain from) the MS2 coat protein, endoribonuclease Csy4, or the lambda N protein. These proteins can be used to recruit RNA molecules containing a specific stem-loop structure to a locale specified by the dCas9 gRNA targeting sequences. For example, a dCas9 variant fused to MS2 coat protein, endoribonuclease Csy4, or lambda N can be used to recruit a long non-coding RNA (lncRNA) such as XIST or HOTAIR; see, e.g., Keryer-Bibens et al., Biol. Cell 100:125-138 (2008), that is linked to the Csy4, MS2 or lambda N binding sequence. Alternatively, the Csy4, MS2 or lambda N protein binding sequence can be linked to another protein, e.g., as described in Keryer-Bibens et al., supra, and the protein can be targeted to the dCas9 variant binding site using the methods and compositions described herein. In some embodiments, the Csy4 is catalytically inactive. In some embodiments, the Cas9 variant, preferably a dCas9 variant, is fused to FokI as described in WO 2014/204578.

[0088] In some embodiments, the fusion proteins include a linker between the dCas9 variant and the heterologous functional domains. Linkers that can be used in these fusion proteins (or between fusion proteins in a concatenated structure) can include any sequence that does not interfere with the function of the fusion proteins. In preferred embodiments, the linkers are short, e.g., 2-20 amino acids, and are typically flexible (i.e., comprising amino acids with a high degree of freedom such as glycine, alanine, and serine). In some embodiments, the linker comprises one or more units consisting of GGGS (SEQ ID NO:188) or GGGGS (SEQ ID NO:189), e.g., two, three, four, or more repeats of the GGGS (SEQ ID NO:188) or GGGGS (SEQ ID NO:189) unit. Other linker sequences can also be used.

[0089] Expression Systems

[0090] To use the Cas9 variants described herein, it may be desirable to express them from a nucleic acid that encodes them. This can be performed in a variety of ways. For example, the nucleic acid encoding the Cas9 variant can be cloned into an intermediate vector for transformation into prokaryotic or eukaryotic cells for replication and/or expression. Intermediate vectors are typically prokaryote vectors, e.g., plasmids, or shuttle vectors, or insect vectors, for storage or manipulation of the nucleic acid encoding the Cas9 variant for production of the Cas9 variant. The nucleic acid encoding the Cas9 variant can also be cloned into an expression vector, for administration to a plant cell, animal cell, preferably a mammalian cell or a human cell, fungal cell, bacterial cell, or protozoan cell.

[0091] To obtain expression, a sequence encoding a Cas9 variant is typically subcloned into an expression vector that contains a promoter to direct transcription. Suitable bacterial and eukaryotic promoters are well known in the art and described, e.g., in Sambrook et al., Molecular Cloning, A Laboratory Manual (3d ed. 2001); Kriegler, Gene Transfer and Expression: A Laboratory Manual (1990); and Current Protocols in Molecular Biology (Ausubel et al., eds., 2010). Bacterial expression systems for expressing the engineered protein are available in, e.g., E. coli, Bacillus sp., and Salmonella (Palva et al., 1983, Gene 22:229-235). Kits for such expression systems are commercially available. Eukaryotic expression systems for mammalian cells, yeast, and insect cells are well known in the art and are also commercially available.

[0092] The promoter used to direct expression of a nucleic acid depends on the particular application. For example, a strong constitutive promoter is typically used for expression and purification of fusion proteins. In contrast, when the Cas9 variant is to be administered in vivo for gene regulation, either a constitutive or an inducible promoter can be used, depending on the particular use of the Cas9 variant. In addition, a preferred promoter for administration of the Cas9 variant can be a weak promoter, such as HSV TK or a promoter having similar activity. The promoter can also include elements that are responsive to transactivation, e.g., hypoxia response elements, Gal4 response elements, lac repressor response element, and small molecule control systems such as tetracycline-regulated systems and the RU-486 system (see, e.g., Gossen & Bujard, 1992, Proc. Natl. Acad. Sci. USA, 89:5547; Oligino et al., 1998, Gene Ther., 5:491-496; Wang et al., 1997, Gene Ther., 4:432-441; Neering et al., 1996, Blood, 88:1147-55; and Rendahl et al., 1998, Nat. Biotechnol., 16:757-761).

[0093] In addition to the promoter, the expression vector typically contains a transcription unit or expression cassette that contains all the additional elements required for the expression of the nucleic acid in host cells, either prokaryotic or eukaryotic. A typical expression cassette thus contains a promoter operably linked, e.g., to the nucleic acid sequence encoding the Cas9 variant, and any signals required, e.g., for efficient polyadenylation of the transcript, transcriptional termination, ribosome binding sites, or translation termination. Additional elements of the cassette may include, e.g., enhancers, and heterologous spliced intronic signals.

[0094] The particular expression vector used to transport the genetic information into the cell is selected with regard to the intended use of the Cas9 variant, e.g., expression in plants, animals, bacteria, fungus, protozoa, etc. Standard bacterial expression vectors include plasmids such as pBR322 based plasmids, pSKF, pET23D, and commercially available tag-fusion expression systems such as GST and LacZ.

[0095] Expression vectors containing regulatory elements from eukaryotic viruses are often used in eukaryotic expression vectors, e.g., SV40 vectors, papilloma virus vectors, and vectors derived from Epstein-Barr virus. Other exemplary eukaryotic vectors include pMSG, pAV009/A+, pMTO10/A+, pMAMneo-5, baculovirus pDSVE, and any other vector allowing expression of proteins under the direction of the SV40 early promoter, SV40 late promoter, metallothionein promoter, murine mammary tumor virus promoter, Rous sarcoma virus promoter, polyhedrin promoter, or other promoters shown effective for expression in eukaryotic cells.

[0096] The vectors for expressing the Cas9 variants can include RNA Pol III promoters to drive expression of the guide RNAs, e.g., the H1, U6 or 7SK promoters. These human promoters allow for expression of Cas9 variants in mammalian cells following plasmid transfection.

[0097] Some expression systems have markers for selection of stably transfected cell lines such as thymidine kinase, hygromycin B phosphotransferase, and dihydrofolate reductase. High yield expression systems are also suitable, such as using a baculovirus vector in insect cells, with the gRNA encoding sequence under the direction of the polyhedrin promoter or other strong baculovirus promoters.

[0098] The elements that are typically included in expression vectors also include a replicon that functions in E. coli, a gene encoding antibiotic resistance to permit selection of bacteria that harbor recombinant plasmids, and unique restriction sites in nonessential regions of the plasmid to allow insertion of recombinant sequences.

[0099] Standard transfection methods are used to produce bacterial, mammalian, yeast or insect cell lines that express large quantities of protein, which are then purified using standard techniques (see, e.g., Colley et al., 1989, J. Biol. Chem., 264:17619-22; Guide to Protein Purification, in Methods in Enzymology, vol. 182 (Deutscher, ed., 1990)). Transformation of eukaryotic and prokaryotic cells are performed according to standard techniques (see, e.g., Morrison, 1977, J. Bacteriol. 132:349-351; Clark-Curtiss & Curtiss, Methods in Enzymology 101:347-362 (Wu et al., eds, 1983).

[0100] Any of the known procedures for introducing foreign nucleotide sequences into host cells may be used. These include the use of calcium phosphate transfection, polybrene, protoplast fusion, electroporation, nucleofection, liposomes, microinjection, naked DNA, plasmid vectors, viral vectors, both episomal and integrative, and any of the other well-known methods for introducing cloned genomic DNA, cDNA, synthetic DNA or other foreign genetic material into a host cell (see, e.g., Sambrook et al., supra). It is only necessary that the particular genetic engineering procedure used be capable of successfully introducing at least one gene into the host cell capable of expressing the Cas9 variant.

[0101] The present invention includes the vectors and cells comprising the vectors.

### Examples

[0102] The invention is further described in the following examples, which do not limit the scope of the invention described in the claims.

[0103] Methods

[0104] The following materials and methods were used in Examples 1 and 2.

[0105] Plasmids and oligonucleotides Schematic maps and DNA sequences for parent constructs used in this study can be found in FIGS. 5A-J and SEQ ID NOs:7-20. Sequences of oligonucleotides used to generate the positive selection plasmids, negative selection plasmids, and site-depletion libraries are available in Table 1. Sequences of all gRNA targets in this study are available in Table 2. Point mutations in Cas9 were generated by PCR.

TABLE 1

| | | SEQ |
|---|---|---|
| | | ID |
| | | NO: |
| sequence | description | |
| Oligos used to generate positive and negative selection plasmids | | |
| ctagaGGGCACGGGCAGCTTGCCGGTGGgcatg | top oligo to clone site 1 into the | 190 |
| | positive selection vector (XbaI/SphI cut | |
| | p11-lacY-wtx1) | |
| CCCACCGGCAAGCTGCCCGTGCCCt | bottom oligo to clone site 1 into the | 191 |
| | positive selection vector | |
| ctagaGGTCGCCCTCGAACTTCACCTCGGgcatg | top oligo to clone site 2 into the | 192 |
| | positive selection vector (XbaI/SphI cut | |
| | p11-lacY-wtx1) | |
| CCCGAGGTGAAGTTCGAGGGCGACCt | bottom oligo to clone site 2 into the | 193 |
| | positive selection vector | |
| aattcGGGCACGGGCAGCTTGCCGGTGGgcatg | top oligo to clone site 1 into the | 194 |
| | negative selection vector (EcoRI/SphI cut | |
| | p11-lacY-wtx1) | |
| CCCACCGGCAAGCTGCCCGTGCCCg | bottom oligo to clone site 1 into the | 195 |
| | negative selection vector | |
| aattcGGTCGCCCTCGAACTTCACCTCGGgcatg | top oligo to clone site 2 into the | 196 |
| | negative selection vector (EcoRI/SphI cut | |
| | p11-lacY-wtx1) | |
| CCCGAGGTGAAGTTCGAGGGCGACCg | bottom oligo to clone site 2 into the | 197 |
| | negative selection vector | |
| Oligos used to generate libraries for site-depletion experiments | | |
| GCAGgaattcGGGCACGGGCAGCTTGCCGGN | top strand oligo for site 1 PAM library, cut | 198 |
| NNNNNCTNNNGCGCAGGTCACGAGGCATG | with EcoRI once filled in | |
| GCAGgaattCGTCGCCCTCGAACTTCACCTN | top strand oligo for site 2 PAM library, cut | 199 |
| NNNNNCTNNNGCGCAGGTCACGAGGCATG | with EcoRI once filled in | |
| /5Phos/CCTCGTGACCTGCGC | reverse primer to fill in library oligos | 200 |
| Primers used to amplify site-depletion libraries for sequencing | | |
| GATACCGCTCGCCGCAGC | forward primer | 201 |
| CTGCGTTCTGATTTAATCTGTATCAGGC | reverse primer | 202 |
| Primers used for T7E1 experiments | | |
| GGAGATGTAAATCACCTCCATCTGA | forward primer targeted to th1 in zebrafish | 203 |
| ATGTTAGCCTACCTCGAAAACCTTC | reverse primer targeted to th1 in zebrafish | 204 |
| CCTGTGCTCTCCTGTTTTTAGGTAT | forward primer targeted to tiall in zebrafish | 205 |
| AACATGGTAAGAAGCGTGAGTGTTT | reverse primer targeted to tiall in zebrafish | 206 |
| CAGGCTGTTGAACCGTAGATTTAGT | forward primer targeted to fh in zebrafish | 207 |
| TCCACATGTTTTGAGTTTGAGAGTC | reverse primer targeted to fh in zebrafish | 208 |
| GGAGCAGCTGGTCAGAGGGG | forward primer targeted to EMX1 in U20S human cells | 209 |
| CCATAGGGAAGGGGGACACTGG | reverse primer targeted to EMX1 in U20S human cells | 210 |
| GGGCCGGGAAAGAGTTGCTG | forward primer targeted to FANCF in U20S human cells | 211 |
| GCCCTACATCTGCTCTCCCTCC | reverse primer targeted to FANCF in U20S human cells | 212 |
| CCAGCACAACTTACTCGCACTTGAC | forward primer targeted to RUNX1 in U20S human cells | 213 |
| CATCACCAACCCACAGCCAAGG | reverse primer targeted to RUNX1 in U20S human cells | 214 |
| GATGAGGGCTCCAGATGGCAC | forward primer targeted to VEGFA in U20S human cells | 215 |
| GAGGAGGGAGCAGGAAAGTGAGG | reverse primer targeted to VEGFA in U20S human cells | 216 |

TABLE 2

| | | | | | | |
|---|---|---|---|---|---|---|
| | | Spacer | | SEQ | | SEQ |
| | | length | | ID | Sequence with extended | ID |
| Prep Name | Name | (nt) | Sequence | NO: | PAM | NO: |

S. pyogenes gRNAS
EGFP
NXX gRNAS

| | | | | | | |
|---|---|---|---|---|---|---|
| FYF1320 | NGG 1-20 | 20 | GGGCACGGGCAGCTTGCCGG | 217 | GGGCACGGGCAGCTTGCCGGTGGT | 218 |
| BPK1345 | NGG 2-20 | 20 | GTCGCCCTCGAACTTCACCT | 219 | GTCGCCCTCGAACTTCACCTCGGC | 220 |
| MSP792 | NGG 3-20 | 20 | GGTCGCCACCATGGTGAGCA | 221 | GGTCGCCACCATGGTGAGCAAGGG | 222 |
| MSP795 | NGG 4-20 | 20 | GGTCAGGGTGGTCACGAGGG | 223 | GGTCAGGGTGGTCACGAGGGTGGG | 224 |
| FYF1328 | NGG 5-20 | 20 | GGTGGTGCAGATGAACTTCA | 225 | GGTGGTGCAGATGAACTTCAGGGT | 226 |
| MSP160 | NAG 1-20 | 20 | GGGTGGTGCCCATCCTGGTC | 227 | GGGTGGTGCCCATCCTGGTCGAGC | 228 |
| MSP161 | NAG 2-20 | 20 | GACGTAAACGGCCACAAGTT | 229 | GACGTAAACGGCCACAAGTTCAGC | 230 |
| MSP162 | NAG 3-20 | 20 | GTGCAGATGAACTTCAGGGT | 231 | GTGCAGATGAACTTCAGGGTCAGC | 232 |
| MSP163 | NAG 4-20 | 20 | GGGTGGTCACGAGGGTGGGC | 233 | GGGTGGTCACGAGGGTGGGCCAGG | 234 |
| MSP164 | NAA 1-20 | 20 | GGTCGAGCTGGACGGCGACG | 235 | GGTCGAGCTGGACGGCGACGTAAA | 236 |
| MSP165 | NAA 2-20 | 20 | GTCGAGCTGGACGGCGACGT | 237 | GTCGAGCTGGACGGCGACGTAAAC | 238 |
| MSP168 | NGA 1-20 | 20 | GGGGTGGTGCCCATCCTGGT | 239 | GGGGTGGTGCCCATCCTGGTCGAG | 240 |
| MSP366 | NGA 2-20 | 20 | GCCACCATGGTGAGCAAGGG | 241 | GCCACCATGGTGAGCAAGGGCGAG | 242 |
| MSP171 | NGA 3-20 | 20 | GTCGCCGTCCAGCTCGACCA | 243 | GTCGCCGTCCAGCTCGACCAGGAT | 244 |

NGXX gRNAS

| | | | | | | |
|---|---|---|---|---|---|---|
| BPK1466 | NGA 4-20 | 20 | GCATCGCCCTCGCCCTCGCC | 245 | GCATCGCCCTCGCCCTCGCCGGAC | 246 |
| BPK1468 | NGA 5-20 | 20 | GTTCGAGGGCGACACCCTGG | 247 | GTTCGAGGGCGACACCCTGGTGAA | 248 |
| BPK1468 | NGAA 1-20 | 20 | GTTCGAGGGCGACACCCTGG | 249 | GTTCGAGGGCGACACCCTGGTGAA | 250. |
| MSP807 | NGAA 2-20 | 20 | GTTCACCAGGGTGTCGCCCT | 251. | GTTCACCAGGGTGTCGCCCTCGAA | 252. |
| BPK1469 | NGAA 3-20 | 20 | GCAGAAGAACGGCATCAAGG | 253. | GCAGAAGAACGGCATCAAGGTGAA | 254. |
| MSP787 | NGAA 3-17 | 17 | GAAGAACGGCATCAAGG | 255. | GAAGAACGGCATCAAGGTGAA | 256. |
| MSP170 | NGAC 1-20 | 20 | GCCCACCCTCGTGACCACCC | 257. | GCCCACCCTCGTGACCACCCTGAC | 258. |
| MSP790 | NGAC 2-20 | 20 | GCCCTTGCTCACCATGGTGG | 259. | GCCCTTGCTCACCATGGTGGCGAC | 260. |
| MSP171 | NGAT 1-20 | 20 | GTCGCCGTCCAGCTCGACCA | 261. | GTCGCCGTCCAGCTCGACCAGGAT | 262. |
| BPK1979 | NGAT 1-17 | 17 | GCCGTCCAGCTCGACCA | 263. | GCCGTCCAGCTCGACCAGGAT | 264. |
| MSP169 | NGAT 2-20 | 20 | GTGTCCGGCGAGGGCGAGGG | 265. | GTGTCCGGCGAGGGCGAGGGCGAT | 266. |
| BPK1464 | NGAT 3-20 | 20 | GGGCAGCTTGCCGGTGGTGC | 267. | GGGCAGCTTGCCGGTGGTGCAGAT | 268. |
| MSP788 | NGAT 3-19 | 19 | GGCAGCTTGCCGGTGGTGC | 269. | GGCAGCTTGCCGGTGGTGCAGAT | 270. |
| MSP789 | NGAT 3-18 | 18 | GCAGCTTGCCGGTGGTGC | 271. | GCAGCTTGCCGGTGGTGCAGAT | 272. |
| MSP168 | NGAG 1-20 | 20 | GGGGTGGTGCCCATCCTGGT | 273. | GGGGTGGTGCCCATCCTGGTCGAG | 274. |
| MSP783 | NGAG 1-19 | 19 | GGGTGGTGCCCATCCTGGT | 275. | GGGTGGTGCCCATCCTGGTCGAG | 276. |
| MSP784 | NGAG 1-18 | 18 | GGTGGTGCCCATCCTGGT | 277. | GGTGGTGCCCATCCTGGTCGAG | 278. |
| MSP785 | NGAG 1-17 | 17 | GTGGTGCCCATCCTGGT | 279. | GTGGTGCCCATCCTGGTCGAG | 280. |
| MSP366 | NGAG 2-20 | 20 | GCCACCATGGTGAGCAAGGG | 281. | GCCACCATGGTGAGCAAGGGCGAG | 282. |
| MSP368 | NGAG 3-20 | 20 | GCCGTAGGTCAGGGTGGTCA | 283 | GCCGTAGGTCAGGGTGGTCACGAG | 284. |
| BPK1974 | NGAG 3-17 | 17 | GTAGGTCAGGGTGGTCA | 285. | GTAGGTCAGGGTGGTCACGAG | 286. |
| MSP376 | NGAG 4-20 | 20 | GCTGCCCGACAACCACTACC | 287. | GCTGCCCGACAACCACTACCTGAG | 288. |
| BPK1978 | NGAG 4-17 | 17 | GCCCGACAACCACTACC | 289. | GCCCGACAACCACTACCTGAG | 290. |
| MSP1028 | NGCA 1-20 | 20 | GCGAGGGCGATGCCACCTAC | 291. | GCGAGGGCGATGCCACCTACGGCA | 292. |
| MSP1030 | NGCA 2-20 | 20 | GTGGTCGGGGTAGCGGCTGA | 293. | GTGGTCGGGGTAGCGGCTGAAGCA | 294. |
| MSP1032 | NGCC 1-20 | 20 | GGAGCTGTTCACCGGGGTGG | 295. | GGAGCTGTTCACCGGGGTGGTGCC | 296. |
| MSP1033 | NGCC 2-20 | 20 | GAACTTGTGGCCGTTTACGT | 297 | GAACTTGTGGCCGTTTACGTCGCC | 298. |
| MSP1036 | NGCT 1-20 | 20 | GGTGAACAGCTCCTCGCCCT | 299. | GGTGAACAGCTCCTCGCCCTTGCT | 300. |
| MSP1037 | NGCT 2-20 | 20 | GGTGGTGCCCATCCTGGTCG | 301 | GGTGGTGCCCATCCTGGTCGAGCT | 302. |
| MSP800 | NGCG 1-20 | 20 | GCCACAAGTTCAGCGTGTCC | 303. | GCCACAAGTTCAGCGTGTCCGGCG | 304. |
| MSP801 | NGCG 2-20 | 20 | GCGTGTCCGGCGAGGGCGAG | 305. | GCGTGTCCGGCGAGGGCGAGGGCG | 306. |
| MSP1360 | NGCG 2-18 | 18 | GTGTCCGGCGAGGGCGAG | 307. | GTGTCCGGCGAGGGCGAGGGCG | 308. |
| MSP802 | NGCG 3-20 | 20 | GCCCGAAGGCTACGTCCAGG | 309. | GCCCGAAGGCTACGTCCAGGAGCG | 310. |
| MSP803 | NGCG 4-20 | 20 | GTCGTCCTTGAAGAAGATGG | 311 | GTCGTCCTTGAAGAAGATGGTGCG | 312. |
| MSP1366 | NGCG 4-17 | 17 | GTCCTTGAAGAAGATGG | 313. | GTCCTTGAAGAAGATGGTGCG | 314. |
| MSP792 | NGGG 1-20 | 20 | GGTCGCCACCATGGTGAGCA | 315 | GGTCGCCACCATGGTGAGCAAGGG | 316. |
| MSP794 | NGGG 2-20 | 20 | GGTGGTCACGAGGGTGGGCC | 317. | GGTGGTCACGAGGGTGGGCCAGGG | 318. |
| MSP796 | NGTG 1-20 | 20 | GATCCACCGGTCGCCACCAT | 319. | GATCCACCGGTCGCCACCATGGTG | 320. |
| MSP799 | NGTG 2-20 | 20 | GTAAACGGCCACAAGTTCAG | 321. | GTAAACGGCCACAAGTTCAGCGTG | 322. |

Endogenous genes
EMX1

| | | | | | | |
|---|---|---|---|---|---|---|
| FYF1548 | NGG 1-20 | 20 | GAGTCCGAGCAGAAGAAGAA | 323. | GAGTCCGAGCAGAAGAAGAAGGGC | 324. |
| MSP809 | NGG 2-20 | 20 | GTCACCTCCAATGACTAGGG | 325. | GTCACCTCCAATGACTAGGGTGGG | 326. |
| MSP811 | NGA 1-20 | 20 | GAGGAGGAAGGGCCTGAGTC | 327. | GAGGAGGAAGGGCCTGAGTCCGAG | 328. |
| MSP812 | NGA 2-20 | 20 | GGTTGCCCACCCTAGTCATT | 329. | GGTTGCCCACCCTAGTCATTGGAG | 330. |
| MSP813 | NGA 3-20 | 20 | GCTGAGCTGAGAGCCTGATG | 331. | GCTGAGCTGAGAGCCTGATGGGAA | 332. |
| MSP814 | NGA 4-20 | 20 | GCCACGAAGCAGGCCAATGG | 333. | GCCACGAAGCAGGCCAATGGGGAG | 334. |

FANCF

| | | | | | | |
|---|---|---|---|---|---|---|
| DR348 | NGG 1-20 | 20 | GGAATCCCTTCTGCAGCACC | 335. | GGAATCCCTTCTGCAGCACCTGGA | 336. |
| MSP815 | NGG 2-20 | 20 | GCTGCAGAAGGGATTCCATG | 337. | GCTGCAGAAGGGATTCCATGAGGT | 338. |
| MSP818 | NGA 1-20 | 20 | GAATCCCTTCTGCAGCACCT | 339. | GAATCCCTTCTGCAGCACCTGGAT | 340. |
| MSP819 | NGA 2-20 | 20 | GTGCTGCAGAAGGGATTCCA | 341. | GTGCTGCAGAAGGGATTCCATGAG | 342. |
| MSP820 | NGA 3-20 | 20 | GCGGCGGCTGCACAACCAGT | 343. | GCGGCGGCTGCACAACCAGTGGAG | 344. |
| MSP885 | NGA 4-20 | 20 | GGTTGTGCAGCCGCCGCTCC | 345. | GGTTGTGCAGCCGCCGCTCCAGAG | 346. |
| MSP1060 | NGCG 1-20 | 20 | GAGGCAAGAGGGCGGCTTTG | 347. | GAGGCAAGAGGGCGGCTTTGGGCG | 348. |
| MSP1061 | NGCG 2-19 | 19 | GGGGTCCAGTTCCGGGATT | 349. | GGGGTCCAGTTCCGGGATTAGCG | 350. |
| MSP1062 | NGCG 3-20 | 20 | GCAGAAGGGATTCCATGAGG | 351. | GCAGAAGGGATTCCATGAGGTGCG | 352. |
| MSP1063 | NGCG 4-19 | 19 | GAAGGGATTCCATGAGGTG | 353. | GAAGGGATTCCATGAGGTGCGCG | 354. |

RUNX1

| | | | | | | |
|---|---|---|---|---|---|---|
| MSP823 | NGG 1-20 | 20 | GCTGAAACAGTGACCTGTCT | 355. | GCTGAAACAGTGACCTGTCTTGGT | 356. |
| MSP824 | NGG 2-20 | 20 | GATGTAGGGCTAGAGGGGTG | 357. | GATGTAGGGCTAGAGGGGTGAGGC | 358. |
| MSP826 | NGA 1-20 | 20 | GGTGCATTTTCAGGAGGAAG | 359. | GGTGCATTTTCAGGAGGAAGCGAT | 360. |
| MSP827 | NGA 2-20 | 20 | GTTTTCGCTCCGAAGGTAAA | 361. | GTTTTCGCTCCGAAGGTAAAAGAA | 362. |
| MSP828 | NGA 3-20 | 20 | GAGATGTAGGGCTAGAGGGG | 363. | GAGATGTAGGGCTAGAGGGGTGAG | 364. |
| MSP829 | NGA 4-20 | 20 | GCAGAGGGGAGAAGAAAGAG | 365. | GCAGAGGGGAGAAGAAAGAGAGAT | 366. |
| MSP1068 | NGCG 1-19 | 19 | GGGTGCATTTTCAGGAGGA | 367. | GGGTGCATTTTCAGGAGGAAGCG | 368. |

VEGFA

| | | | | | | |
|---|---|---|---|---|---|---|
| VC228 | NGG 1-20 | 20 | GGTGAGTGAGTGTGTGCGTG | 369. | GGTGAGTGAGTGTGTGCGTGTGGG | 370. |
| MSP830 | NGG 2-20 | 20 | GTTGGAGCGGGGAGAAGGCC | 371. | GTTGGAGCGGGGAGAAGGCCAGGG | 372. |
| BPK1846 | NGA 1-20 | 20 | GCGAGCAGCGTCTTCGAGAG | 373. | GCGAGCAGCGTCTTCGAGAGTGAG | 374. |
| BPK1848 | NGA 2 -20 | 20 | GACGTGTGTGTCTGTGTGGG | 375. | GACGTGTGTGTCTGTGTGGGTGAG | 376. |
| BPK1850 | NGA 3-20 | 20 | GGTTGAGGGCGTTGGAGCGG | 377. | GGTTGAGGGCGTTGGAGCGGGGAG | 378. |
| MSP831 | NGA 4-20 | 20 | GCTTTGGAAAGGGGGTGGGG | 379. | GCTTTGGAAAGGGGGTGGGGGGAG | 380. |
| MSP1074 | NGCG 1-20 | 20 | GCAGACGGCAGTCACTAGGG | 381. | GCAGACGGCAGTCACTAGGGGGCG | 382. |
| MSP1075 | NGCG 2-20 | 20 | GCTGGGTGAATGGAGCGAGC | 383. | GCTGGGTGAATGGAGCGAGCAGCG | 384. |
| MSP1076 | NGCG 3-19 | 19 | GTGTGGGTGAGTGAGTGTG | 385. | GTGTGGGTGAGTGAGTGTGTGCG | 386. |
| MSP1077 | NGCG 4-19 | 19 | GTGTGCGTGTGGGGTTGAG | 387. | GTGTGCGTGTGGGGTTGAGGGCG | 388. |

S. aureus gRNAs
EGFP

| | | | | | | |
|---|---|---|---|---|---|---|
| MSP1395 | Site 1-20 | 20 | GTCGTGCTGCTTCATGTGGT | 389. | GTCGTGCTGCTTCATGTGGTCGGGGT | 390. |
| MSP1405 | Site 1-23 | 23 | GAAGTCGTGCTGCTTCATGTGGT | 391. | GAAGTCGTGCTGCTTCATGTGGTCGGGGT | 392. |
| MSP1396 | Site 2-21 | 21 | GCCGGTGGTGCAGATGAACTT | 393. | GCCGGTGGTGCAGATGAACTTCAGGGT | 394. |
| MSP1397 | Site 3-21 | 21 | GCCGTAGGTCAGGGTGGTCAC | 395. | GCCGTAGGTCAGGGTGGTCACGAGGGT | 396. |
| MSP1400 | Site 4-21 | 21 | GCAACATCCTGGGGCACAAGC | 397. | GCAACATCCTGGGGCACAAGCTGGAGT | 398. |
| MSP1404 | Site 4-22 | 22 | GGCAACATCCTGGGGCACAAGC | 399. | GGCAACATCCTGGGGCACAAGCTGGAGT | 400. |
| MSP1398 | Site 5-21 | 21 | GAAGCACTGCACGCCGTAGGT | 401. | GAAGCACTGCACGCCGTAGGTCAGGGT | 402. |
| MSP1408 | Site 5-24 | 24 | GCTGAAGCACTGCACGCCGTAGGT | 403. | GCTGAAGCACTGCACGCCGTAGGTCAGGGT | 404. |
| MSP1428 | Site 6-21 | 21 | GCCCTCGAACTTCACCTCGGC | 405. | GCCCTCGAACTTCACCTCGGCGCGGGT | 406. |
| MSP1409 | Site 6-24 | 24 | GTCGCCCTCGAACTTCACCTCGGC | 407. | GTCGCCCTCGAACTTCACCTCGGCGCGGGT | 408. |
| MSP1403 | Site 7-22 | 22 | GCAAGGGCGAGGAGCTGTTCAC | 409. | GCAAGGGCGAGGAGCTGTTCACCGGGGT | 410. |
| MSP1406 | Site 7-24 | 24 | GAGCAAGGGCGAGGAGCTGTTCAC | 411. | GAGCAAGGGCGAGGAGCTGTTCACCGGGGT | 412. |
| MSP1410 | Site 8-24 | 24 | GCCCTTCAGCTCGATGCGGTTCAC | 413. | GCCCTTCAGCTCGATGCGGTTCACCAGGGT | 414. |

S. thermophilus1 gRNAs
EGFP

| | | | | | | |
|---|---|---|---|---|---|---|
| MSP1412 | Site 1-20 | 20 | GTCTATATCATGGCCGACAA | 415. | GTCTATATCATGGCCGACAAGCAGAA | 416. |
| MSP1414 | Site 2-21 | 21 | GCAGCTCGCCGACCACTACCA | 417. | GCAGCTCGCCGACCACTACCAGCAGAA | 418. |
| MSP1417 | Site 2-23 | 23 | GTGCAGCTCGCCGACCACTACCA | 419. | GTGCAGCTCGCCGACCACTACCAGCAGAA | 420. |
| MSP1413 | Site 3-21 | 21 | GCCTTCGGGCATGGCGGACTT | 421. | GCCTTCGGGCATGGCGGACTTGAAGAA | 422. |
| MSP1418 | Site 3-24 | 24 | GTAGCCTTCGGGCATGGCGGACTT | 423. | GTAGCCTTCGGGCATGGCGGACTTGAAGAA | 424. |
| MSP1416 | Site 4-23 | 23 | GTCTATATCATGGCCGACAAGCA | 425. | GTCTATATCATGGCCGACAAGCAGAAGAA | 426. |
| MSP1415 | Site 5-23 | 23 | GTCTTGTAGTTGCCGTCGTCCTT | 427. | GTCTTGTAGTTGCCGTCGTCCTTGAAGAA | 428. |
| MSP1419 | Site 5-24 | 24 | GGTCTTGTAGTTGCCGTCGTCCTT | 429. | GGTCTTGTAGTTGCCGTCGTCCTTGAAGAA | 430. |

[0106] Bacterial Cas9/sgRNA expression plasmids were constructed with two T7 promoters to separately express Cas9 and the sgRNA. These plasmids encode human codon optimized versions of Cas9 for S. pyogenes (BPK764, SpCas9 sequence subcloned from JDS246¹⁷), S. thermophilus Cas9 from CRISPR locus 1 (MSP1673, St1Cas9 sequence modified from previous published description²⁰), and S. aureus (BPK2101, SaCas9 sequence codon optimized from Uniprot J7RUA5). Previously described sgRNA sequences were utilized for SpCas9^{34, 35} and St1Cas9²⁰, while the SaCas9 sgRNA sequence was determined by searching the European Nucleotide Archive sequence HE980450 for crRNA repeats using CRISPRfinder and identifying the tracrRNA using a bioinformatic approach similar to one previously described³⁶. Annealed oligos to complete the spacer complementarity region of the sgRNA were ligated into BsaI cut BPK764 and BPK2101, or BspMI cut MSP1673 (append 5′-ATAG to the spacer to generate the top oligo and append 5′-AAAC to the reverse compliment of the spacer sequence to generate the bottom oligo).

[0107] Residues 1097-1368 of SpCas9 were randomly mutagenized using Mutazyme II (Agilent Technologies) at a rate of ˜5.2 substitutions/kilobase to generate mutagenized PAM-interacting (PI) domain libraries. The theoretical complexity of each PI domain library was estimated to be greater than 107 clones based on the number of transformants obtained. Positive and negative selection plasmids were generated by ligating annealed target site oligos into XbaI/SphI or EcoRI/SphI cut p11-lacY-wtxl¹⁷, respectively.

[0108] Two randomized PAM libraries (each with a different protospacer sequence) were constructed using Klenow(-exo) to fill-in the bottom strand of oligos that contained six randomized nucleotides directly adjacent to the 3′ end of the protospacer (see Table 1). The double-stranded product was cut with EcoRI to leave EcoRI/SphI ends for ligation into cut p11-lacY-wtx1. The theoretical complexity of each randomized PAM library was estimated to be greater than 10⁶ based on the number of transformants obtained.

[0109] SpCas9 and SpCas9 variants were expressed in human cells from vectors derived from JDS246¹⁶. For St1Cas9 and SaCas9, the Cas9 ORFs from MSP1673 and BPK2101 were subcloned into a CAG promoter vector to generate MSP1594 and BPK2139, respectively. Plasmids for U6 expression of sgRNAs (into which desired spacer oligos can be cloned) were generated using the sgRNA sequences described above for the SpCas9 sgRNA (BPK1520), the St1Cas9 sgRNA (BPK2301), and the SaCas9 gRNA (VVT1). Annealed oligos to complete the spacer complementarity region of the sgRNA were ligated into the BsmBI overhangs of these vectors (append 5′-CACC to the spacer to generate the top oligo and append 5′-AAAC to the reverse complement of the spacer sequence to generate the bottom oligo).

[0110] Bacterial-Based Positive Selection Assay for Evolving SpCas9 Variants

[0111] Competent E. coli BW25141(λDE3)²³ containing a positive selection plasmid (with embedded target site) were transformed with Cas9/sgRNA-encoding plasmids. Following a 60 minute recovery in SOB media, transformations were plated on LB plates containing either chloramphenicol (non-selective) or chloramphenicol+10 mM arabinose (selective). Cleavage of the positive selection plasmid was estimated by calculating the survival frequency: colonies on selective plates/colonies on non-selective plates (see also FIG. 12).

[0112] To select for SpCas9 variants that can cleave novel PAMs, PI-domain mutagenized Cas9/sgRNA plasmid libraries were electroporated into E. coli BW25141(aDE3) cells containing a positive selection plasmid that encodes a target site+PAM of interest. Generally ˜50,000 clones were screened to obtain between 50-100 survivors. The PI domains of surviving clones were subcloned into fresh backbone plasmid and re-tested in the positive selection. Clones that had greater than 10% survival in this secondary screen for activity were sequenced. Mutations observed in the sequenced clones were chosen for further assessment based on their frequency in surviving clones, type of substitution, proximity to the PAM bases in the SpCas9/sgRNA crystal structure (PDB:4UN3)¹⁴, and (in some cases) activities in a human cell-based EGFP disruption assay.

[0113] Bacterial-Based Site-Depletion Assay for Profiling Cas9 PAM Specificities

[0114] Competent E. coli BW25141(aDE3) containing a Cas9/sgRNA expression plasmid were transformed with negative selection plasmids harboring cleavable or non-cleavable target sites. Following a 60 minute recovery in SOB media, transformations were plated on LB plates containing chloramphenicol+carbenicillin. Cleavage of the negative selection plasmid was estimated by calculating the colony forming units per μg of DNA transformed (see also FIG. 13).

[0115] The negative selection was adapted to determine PAM specificity profiles of Cas9 nucleases by electroporating each randomized PAM library into E. coli BW25141(aDE3) cells that already harbored an appropriate Cas9/sgRNA plasmid. Between 80,000-100,000 colonies were plated at a low density spread on LB+chloramphenicol+carbenicillin plates. Surviving colonies containing negative selection plasmids refractory to cleavage by Cas9 were harvested and plasmid DNA isolated by maxi-prep (Qiagen). The resulting plasmid library was amplified by PCR using Phusion Hot-start Flex DNA Polymerase (New England BioLabs) followed by an Agencourt Ampure XP cleanup step (Beckman Coulter Genomics). Dual-indexed Tru-Seq Illumina deep-sequencing libraries were prepared using the KAPA HTP library preparation kit (KAPA BioSystems) from −500 ng of clean PCR product for each site-depletion experiment. The Dana-Farber Cancer Institute Molecular Biology Core performed 150-bp paired-end sequencing on an Illumina MiSeq Sequencer.

[0116] The raw FASTQ files outputted for each MiSeq run were analyzed with a Python program to determine relative PAM depletion. The program (see Methods) operates as follows: First, a file dialog is presented to the user from which all FASTQ read files for a given experiment can be selected. For these files, each FASTQ entry is scanned for the fixed spacer region on both strands. If the spacer region is found, then the six variable nucleotides flanking the spacer region are captured and added to a counter. From this set of detected variable regions, the count and frequency of each window of length 2-6 nt at each possible position was tabulated. The site-depletion data for both randomized PAM libraries was analyzed by calculating the post-selection PAM depletion value (PPDV): the post-selection frequency of a PAM in the selected population divided by the pre-selection library frequency of that PAM. PPDV analyses were performed for each experiment across all possible 2-6 length windows in the 6 bp randomized region. The windows we used to visualize PAM preferences were: the 3 nt window representing the 2^{nd}, 3^{rd}, and 4^{th} PAM positions for wild-type and variant SpCas9 experiments, and the 4 nt window representing the 3^{rd}, 4^{th}, 5^{th}, 6^{th} PAM positions for St1Cas9 and SaCas9.

[0117] Two significance thresholds for the PPDVs were determined based on: 1) a statistical significance threshold based on the distribution of dCas9 versus pre-selection library log read count ratios (see FIGS. 13C & 13D), and 2) a biological activity threshold based on an empirical correlation between depletion values and activity in human cells. The statistical threshold was set at 3.36 standard deviations from the mean PPDV for dCas9 (equivalent to a relative PPDV of 0.85), corresponding to a normal distribution two-sided p-value of 0.05 after adjusting for multiple comparisons (i.e. p=0.05/64). The biological activity threshold was set at 5-fold depletion (equivalent to a PPDV of 0.2) because this level of depletion serves as a reasonable predictor of activity in human cells (see also FIG. 14). The 95% confidence intervals in FIG. 14 were calculated by dividing the standard deviation of the mean, by the square root of the sample size multiplied by 1.96.

[0118] Human Cell Culture and Transfection

[0119] U2OS.EGFP cells harboring a single integrated copy of a constitutively expressed EGFP-PEST reporter gene¹⁵ were cultured in Advanced DMEM media (Life Technologies) supplemented with 10% FBS, 2 mM GlutaMax (Life Technologies), penicillin/streptomycin, and 400 μg/ml of G418 at 37° C. with 5% CO₂. Cells were co-transfected with 750 ng of Cas9 plasmid and 250 ng of sgRNA plasmid (unless otherwise noted) using the DN-100 program of a Lonza 4D-nucleofector according to the manufacturer's protocols. Cas9 plasmid transfected together with an empty U6 promoter plasmid was used as a negative control for all human cell experiments. Target sites for endogenous gene experiments were selected within 200 bp of NGG sites cleavable by wild-type SpCas9 (see FIG. 16A and Table 2).

[0120] Zebrafish Care and Injections

[0121] Zebrafish care and use was approved by the Massachusetts General Hospital Subcommittee on Research Animal Care. Cas9 mRNA was transcribed with PmeI-digested JDS246 (wild-type SpCas9) or MSP469 (VQR variant) using the mMESSAGE mMACHINE T7 ULTRA Kit (Life Technologies) as previously described²¹. All sgRNAs in this study were prepared according to the cloning-independent sgRNA generation method²⁴. sgRNAs were transcribed by the MEGAscript SP6 Transcription Kit (Life Technologies), purified by RNA Clean & Concentrator-5 (Zymo Research), and eluted with RNase-free water.

[0122] sgRNA- and Cas9-encoding mRNA were co-injected into one-cell stage zebrafish embryos. Each embryo was injected with ˜2-4.5 nL of solution containing 30 ng/μL gRNA and 300 ng/μL Cas9 mRNA. The next day, injected embryos were inspected under a stereoscope for normal morphological development, and genomic DNA was extracted from 5 to 9 embryos.

[0123] Human Cell EGFP Disruption Assay

[0124] EGFP disruption experiments were performed as previously described¹⁶. Transfected cells were analyzed for EGFP expression ˜52 hours post-transfection using a Fortessa flow cytometer (BD Biosciences). Background EGFP loss was gated at approximately 2.5% for all experiments (graphically represented as a dashed line).

[0125] T7E1 Assay, Targeted Deep-Sequencing, and GUIDE-Seq to Quantify Nuclease-Induced Mutation Rates

[0126] T7E1 assays were performed as previously described for human cells¹⁵ and zebrafish²¹. For U2OS.EGFP human cells, genomic DNA was extracted from transfected cells ˜72 hours post-transfection using the Agencourt DNAdvance Genomic DNA Isolation Kit (Beckman Coulter Genomics). Target loci from zebrafish or human cell genomic DNA were amplified using the primers listed in Table 1. Roughly 200 ng of purified PCR product was denatured, annealed, and digested with T7E1 (New England BioLabs). Mutagenesis frequencies were quantified using a Qiaxcel capillary electrophoresis instrument (QIagen), as previously described for human cells¹⁵ and zebrafish²¹.

[0127] For targeted deep-sequencing, previously characterized on- and off-target sites (Tsai et al., Nat Biotechnol 33, 187-197 (2015); Fu et al., Nat Biotechnol 31, 822-826 (2013; Fu et al., Nat Biotechnol 32, 279-284 (2014)) were amplified using Phusion Hot-start Flex with the primers listed in Table 1. Genomic loci were amplified for a control condition (empty sgRNA), wild-type, and D1135E SpCas9. An Agencourt Ampure XP cleanup step (Beckman Coulter Genomics) was performed prior to pooling ˜500 ng of DNA from each condition for library preparation. Dual-indexed Tru-Seq Illumina deep-sequencing libraries were generated using the KAPA HTP library preparation kit (KAPA BioSystems). The Dana-Farber Cancer Institute Molecular Biology Core performed 150-bp paired-end sequencing on an Illumina MiSeq Sequencer. Mutation analysis of targeted deep-sequencing data was performed as previously described (Tsai et al., Nat Biotechnol 32, 569-576 (2014)). Briefly, Illumina MiSeq paired end read data was mapped to human genome reference GRChr37 using bwa (Li et al., Bioinformatics 25, 1754-1760 (2009)). High-quality reads (quality score >=30) were assessed for indel mutations that overlapped the target or off-target sites. 1-bp indel mutations were excluded from the analysis unless they occurred within 1-bp of the predicted breakpoint. Changes in activity at on- and off-target sites comparing D1135E versus wild-type SpCas9 were calculated by comparing the indel frequencies from both conditions (for rates above background control amplicon indel levels).

[0128] GUIDE-seq experiments were performed as previously described (Tsai et al., Nat Biotechnol 33, 187-197 (2015)). Briefly, phosphorylated, phosphorothioate-modified double-stranded oligodeoxynucleotides (dsODNs) were transfected into U2OS cells with Cas9 nuclease along with Cas9 and sgRNA expression plasmids, as described above. dsODN-specific amplification, high-throughput sequencing, and mapping were performed to identify genomic intervals containing DSB activity. For wild-type versus D1135E experiments, off-target read counts were normalized to the on-target read counts to correct for sequencing depth differences between samples. The normalized ratios for wild-type and D1135E SpCas9 were then compared to calculate the fold-change in activity at off-target sites. To determine whether wild-type and D1135E samples for GUIDE-seq had similar oligo tag integration rates at the intended target site, restriction fragment length polymorphism (RFLP) assays were performed by amplifying the intended target loci with Phusion Hot-Start Flex from 100 ng of genomic DNA (isolated as described above) using primers listed in Table 1. Roughly 150 ng of PCR product was digested with 20 U of NdeI (New England BioLabs) for 3 hours at 37° C. prior to clean-up using the Agencourt Ampure XP kit. RFLP results were quantified using a Qiaxcel capillary electrophoresis instrument (Qlagen) to approximate oligo tag integration rates. T7E1 assays were performed for a similar purpose, as described above.

[0129] Software—for Analyzing PAM Depletion MiSeq Data

```
Run in the command prompt (in the directory containing the file) using the command ″python
PAM_depletion.py″
----------------------------------------------------------------------------------------------------------------------------
-----
import numpy as np
import pandas as pd
import glob
import fnmatch
import os
from collections import Counter
from Bio.Seq import Seq
from Bio import SeqIO
import itertools
import re
from pandas import ExcelWriter
import Tkinter, tkFileDialog
_{——}author_{——} = ″Ved V. Topkar″
_{——}version_{——} = ″1.0″
″″″
IUPAC_notation_regex describes a mapping between certain base characters and the
relavent regex string
(Useful for parsing out ambiguous base strings)
″″″
IUPAC_notation_regex = {
  ′N′: ′[ATCG]′,
  ′Y′: ′[CT]′,
  ′R′: ′[AG]′,
  ′W′: ′[AT]′,
  ′S′: ′[CG]′,
  ′A′: ′A′,
  ′T′: ′T′,
  ′C′: ′C′,
  ′G′: ′G′
}
def ambiguous_PAMs(length):
  ″″″
  Given an inputted length, return a list of strings describing all possible PAM
sequences
  NOTE: Returned strings include ambiguous base characters
  ″″″
  permutations = itertools.product([′N′, ′A′, ′T′, ′C′, ′G′], repeat=length)
  PAMS = [ ]
  for item in permutations:
    PAMs.append(′′.join(item))
  return PAMs
def unambiguous_PAMs(length):
  permutations = itertools.product([′A′, ′T′, ′C′, ′G′], repeat=length)
  PAMS = [ ]
  for item in permutations:
    PAMs.append(′′.join(item))
  return PAMs
def regex_from_seq(seq):
  ″″″
  Given a sequence with ambiguous base characters, returns a regex that matches
for
  the explicit (unambiguous) base characters
  ″″″
  regex = ′′
  for c in seq:
    regex += IUPAC_notation_regex[c]
  return regex
def regex_match_count (regex, list_of_counts):
  ″″″
  Given a list of strings and a regex, return the number of strings in the list
that the regex matches.
  ″″″
  c = 0
  for item in list_of_counts:
    if re.search(regex, item):
      c += 1
  return c
def tabulate_substring_frequencies(pams, indices):
  ″″″
  Given a list of raw pams and substring indices, tabulates the frequency of
tabulate_substring_frequencies
  RETURNS a Pandas Series
  ″″″
  base_PAMs = unambiguous_PAMs(indices[1] − indices[0])
  tmp_PAMs = Counter([pam[indices[0]:indices[1]] for pam in pams])
  c = Counter( )
  for base_PAM in base_PAMs:
    c[base_PAM] = tmp_PAMs[base_PAM]
  PAMS = pd.Series(c)
  PAMs.sort(ascending=False)
  excel_PAMs = pd.DataFrame( )
  excel_PAMs[′PAM′] = PAMs.index
  excel_PAMs[′Count′] = PAMs.values
  excel_PAMs[′Frequency′] = PAMs.values.astype(float)/sum(PAMs.values)
  return excel_PAMs
def generate_raw_PAM_counts(filepaths, targetsites, PAM_length):
  ″″″
  Here, we get all of our relavent PAM sequences from the inputted files
  by searching for the targetsites and looking at the flanking region
  ″″″
  reverse_target_sequences = {targetsite:
str(Seq(targetsites[targetsite]).reverse_complement( )) for targetsite in
targetsites}
  all_pams = {targetsite: [ ] for targetsite in targetsites}
  # Iterate through each file and collect the PAMs of each sequence
  # Checks both forward and reverse reads
  for filepath in filepaths:
    print ′Scanning file: ′ + os.path.basename(filepath)
    pams = [ ]
    records = SeqIO.parse(filepath, filepath.split(′.′)[−1])
    for record in records:
      seq = str(record.seq)
      for targetsite in targetsites:
        target_seq = targetsites[targetsite]
        target = seq.find(targetsites[targetsite])
        if target > −1:
          index = target + len(target_seq)
          all_pams[targetsite].append(seq[index:index + PAM_length])
        else:
          target = seq.find(reverse_target_sequences[targetsite])
          if target > −1:
            index = target
            all_pams[targetsite].append(str(Seq(seq[index −
PAM_length:index]).reverse_complement( )))
  return all_pams
def analyze_PAM_depletion_data(filepaths, targetsites, PAM_length=3):
  ″″″
  Given a directory that contains a given file extension and a target sequence,
do the entire PAM depletion analysis
  ″″″
  # Make sure that dirnames and target sequences are inputted
  if filepaths is None:
    raise Exception(′Please specify a directory name′)
  if targetsites is None:
    raise Exception(′Please specify a target sequence′)
  if PAM_length is None or PAM_length < 3:
    raise Exception(′Please enter a valid PAM length′)
  all_pams = generate_raw_PAM_counts(filepaths, targetsites, PAM_length)
  letters = [′A′, ′T′, ′C′, ′G′]
  all_counters = {targetsite: Counter(all_pams[targetsite]) for targetsite in
targetsites}
  for targetsite in targetsites:
    pams = all_pams[targetsite]
    base_counters = [Counter( ) for x in range(PAM_length)]
    for pam in pams:
      for i, c in enumerate(pam):
        base_counters[i][c] += 1
    raw_PAM_counts = pd.Series(all_counters[targetsite])
    raw_PAM_counts.sort(ascending=False)
    raw_counts_df = pd.DataFrame( )
    raw_counts_df[′PAM′] = raw_PAM_counts.index
    raw_counts_df[′Count′] = raw_PAM_counts.values
    single_base_counts = pd.DataFrame(base_counters)
    single_base_frequencies =
single_base_counts.divide(single_base_counts.sum(axis=1).ix[0])
    # Prepare substring counts and frequencies
    writer = ExcelWriter(′out/′ + os.path.basename(filepath).split(′.′)[0] +
′_′ + targetsite + ′.xlsx′)
    single_base_counts.to_excel(writer, ′Single Base Counts′)
    single_base_frequencies.to_excel(writer, ′Single Base Frequencies′)
    raw_counts_df.to_excel (writer, ′Raw PAM Counts′)
    # Designate which windows should be analyzed and name them
    settings = {
          ′XXXNNN′: [0,3],
          ′NXXXNN′: [1,4],
          ′NNXXXN′: [2,5],
          ′NNNXXX′: [3,6],
          ′XXXXNN′: [0,4],
          ′NXXXXN′: [1,5],
          ′NNXXXX′: [2,6],
          ′XXNNNN′: [0,2],
          ′NXXNNN′: [1,3],
          ′NNXXNN′: [2,4],
          ′NNNXXN′: [3,5],
          ′NNNNXX′: [4,6],
          ′XXXXXN′: [0,5],
          ′NXXXXX′: [1,6],
          ′XXXXXX′: [0,6],
          }
    for item in settings:
      df = tabulate_substring_frequencies(pams, settings[item])
      df.to_excel(writer, item)
    writer.save( )
    print ′Saved excel output for ′ + targetsite
if _{——}name_{——} == ″_{——}main_{——}″:
  # Display the filepicker, accepting only FASTQ files
  root = Tkinter.Tk( )
  root.withdraw( )
  file_paths = tkFileDialog.askopenfilenames(parent=root, title=′Choose FASTQ
files′, filetypes=[(″FastQ files″, ″*.fastq″)])
  # Describe the targetsite(s) to search for
  targetsites = {′EGFP site 1′: ′GTCGCCCTCGAACTTCACCT′}
  # Run the analysis on the inputted filepaths and targetsite for a given
variable nucleotide region length
  analyze_PAM_depletion_data(file_paths, targetsites, PAM_length=6)
---------------------------------------------------------------------------------------------------
```

### Example 1

[0130] One potential solution to address targeting range limitations would be to engineer Cas9 variants with novel PAM specificities. A previous attempt to alter PAM specificity utilized structural information about base-specific SpCas9-PAM interactions to mutate arginine residues (R1333 and R1335) that contact guanine nucleotides at the second and third PAM positions, respectively (Anders et al., Nature 513, 569-573 (2014)). Substitution of both arginines with glutamines (whose side-chains might be expected to interact with adenines) failed to yield SpCas9 variants that could cleave targets harboring the expected NAA PAM in vitro (Anders et al., Nature 513, 569-573 (2014)). Using a human cell-based U2OS EGFP reporter gene disruption assay in which nuclease-induced indels lead to loss of fluorescence (Reyon et al., Nat Biotechnol 30, 460-465 (2012); Fu et al., Nat Biotechnol 31, 822-826 (2013)), we confirmed that an R1333Q/R1335Q SpCas9 variant failed to efficiently cleave target sites with NAA PAMs (FIG. 1A). Additionally, we found that single R1333Q and R1335Q SpCas9 variants each failed to efficiently cleave target sites with their expected NAG and NGA sites, respectively (FIG. 1A). We therefore reasoned that re-engineering PAM specificity might require additional mutations at positions other than R1333 and R1335. For example, available structural information shows that K1107 and S1136 make direct and indirect minor groove contacts to the second and third bases in the PAM, respectively (Anders et al., Nature 513, 569-573 (2014)). Therefore, it is plausible that additional alterations at or near these positions might be needed to alter PAM specificity.

[0131] To identify additional positions that might be critical for modifying PAM specificity, we adapted a bacterial selection system previously used to study properties of homing endonucleases (hereafter referred to as the positive selection) (Chen & Zhao, Nucleic Acids Res 33, e154 (2005); Doyon et al., J Am Chem Soc 128, 2477-2484 (2006)). In our adaptation of this system, Cas9-mediated cleavage of a positive selection plasmid encoding an inducible toxic gene enables cell survival, due to subsequent degradation and loss of the linearized plasmid (FIG. 1B and FIG. 12A). After establishing that SpCas9 can function in the positive selection system, we tested both wild-type and the R1335Q variant for their ability to cleave a selection plasmid harboring a target site with an NGA PAM and failed to observe survival, as expected (FIG. 12A). To screen for gain-of-function mutations, we generated libraries of wild-type and R1335Q SpCas9 bearing randomly mutagenized PAM-interacting domains (amino acid positions 1097-1368) with a mean rate of 5.2 mutations per kilobase (FIG. 12B and Methods). These libraries were introduced into bacteria with a positive selection plasmid containing a target site with an NGA PAM and plated on selective medium. Sequences of surviving clones from the R1335Q-based library revealed that the most frequent substitutions in addition to the pre-existing R1335Q mutation were D1135V/Y/N/E and T1337R (Table 3). We obtained fewer survivors with the wild-type SpCas9-based library selection but the sequences of these clones also included D1135V/Y/N and R1335Q mutations. We next assembled and tested SpCas9s bearing all possible single, double, and triple combinations of the D1135V/Y/N/E, R1335Q, and T1337R mutations using the human cell-based EGFP disruption assay. This analysis showed that SpCas9 variants with substitutions at all three positions displayed the highest activities on an NGA PAM, but also the lowest activities on an NGG PAM (FIG. 1C). We chose two SpCas9 variants, D1135V/R1335Q/T1337R and D1135E/R1335Q/T1337R (hereafter referred to as the VQR and EQR SpCas9 variants, respectively), because they possessed the greatest discrimination between NGA and NGG PAMs (FIG. 1C), for further characterization.

[0132] To assess the global PAM specificity profiles of our novel SpCas9 variants, we used a bacterial-based negative selection system (FIG. 1D and FIG. 13A). Previous studies have used similar types of selection systems to identify the cleavage site preferences of Cas9 nucleases (Jiang et al., Nat Biotechnol 31, 233-239 (2013); Esvelt et al., Nat Methods 10, 1116-1121 (2013)). In our version of this assay (which we refer to as the site-depletion assay), a library of plasmids bearing randomized 6 bp sequences placed adjacent to a protospacer is tested for cleavage by a Cas9/sgRNA complex in E. coli (FIG. 13B). Plasmids with protospacer-adjacent sequences resistant to cleavage by a Cas9/sgRNA complex enable cell survival due to the presence of an antibiotic resistance gene, whereas plasmids bearing cleavable sequences are degraded and therefore depleted from the library (FIG. 13B). High-throughput sequencing of ˜100,000 non-targetable sequences enabled us to calculate a post-selection PAM depletion value (PPDV) for any given PAM. The PPDV of a PAM (or group of PAMs) is defined as the frequency of that PAM in the post-selection population divided by its frequency in the pre-selection library. This quantitative value provides an estimate of Cas9 activity on that PAM. Profiles obtained with catalytically inactive Cas9 (dCas9) on two randomized PAM libraries (each with a different protospacer) enabled us to define what represents a statistically significant change in PPDV for any given PAM or group of PAMs (FIG. 13C). We then validated our site-depletion assay by demonstrating that the PPDVs for wild-type SpCas9 obtained with the two randomized PAM libraries recapitulated its previously described profile of targetable PAMs (Jiang et al., Nat Biotechnol 31, 233-239 (2013)) (FIG. 1E).

[0133] Using the site-depletion assay, we obtained PAM specificity profiles for the VQR and EQR SpCas9 variants using the two randomized PAM libraries. The VQR variant strongly depleted sites bearing NGAN and NGCG PAMs, and more weakly NGGG, NGTG, and NAAG PAMs (FIG. 1F). In contrast, the EQR variant strongly depleted NGAG PAMs and more weakly NGAT, NGAA, and NGCG PAMs (FIG. 1F), demonstrating a potentially more limited targeting range relative to the VQR variant. To test whether PAMs identified by the site-depletion assay could also be recognized in human cells, we assessed cleavage by the VQR and EQR SpCas9 variants on target sites using the EGFP disruption assay. The VQR variant robustly cleaved sites in EGFP bearing NGAN PAMs (with relative efficiencies NGAG>NGAT=NGAA>NGAC), and also sites bearing NGCG, NGGG, and NGTG PAMs with generally lower efficiencies (FIG. 1G). The EQR variant also recapitulated its preference for NGAG and NGNG PAMs over the other NGAN PAMs in human cells, again all at lower activities than with the VQR variant (FIG. 1G). Collectively, these results in human cells strongly mirror what was observed with the bacterial site-depletion assay (FIG. 14) and suggested that PPDVs of 0.2 (representing a five-fold depletion) in the bacterial assay provide a reasonable predictive threshold for activity in human cells (FIG. 14).

[0134] We next sought to extend the generalizability of our engineering strategy by attempting to identify SpCas9 variants capable of recognizing an NGC PAM. We first designed Cas9 mutants bearing amino acid substitutions of R1335 that might be expected to interact with a cytosine (D, E, S, or T) and found no activity on an NGC PAM site using the positive selection system. We then randomly mutagenized the PAM-interacting domain of each of these singly substituted SpCas9 variants but still failed to obtain surviving colonies in positive selections. Because the T1337R mutation had increased the activities of our VQR and EQR SpCas9 variants (FIG. 1C), we combined this mutation with R1335 substitutions of A, D, E, S, T, or V, and again randomly mutagenized their PAM-interacting domains. Selections using two of these six mutagenized libraries (bearing pre-existing R1335E/T1337R and R1335T/T1337R substitutions) yielded surviving colonies harboring a variety of additional mutations (Table 3). Characterization of various selected clones using both bacterial and human cell-based assays suggested that substitutions at four positions in particular (D1135V, G1218R, R1335E, and T1337R) appeared to be important for cleavage of NGC PAMs. Assembly and testing of all potential single, double, triple, and quadruple combinations of these mutations using the EGFP disruption assay established that the quadruple VRER variant displayed the highest activity on an NGCG PAM and minimal activity on an NGGG PAM (FIG. 1H). Analysis of the VRER variant using the site-depletion assay revealed it to be highly specific for NGCG PAMs (FIG. 1I). Consistent with this result, EGFP disruption assays performed in human cells with the VRER variant revealed efficient cleavage of sites with NGCG PAMs, greatly decreased and inconsistent cleavage of sites with NGCA, NGCC, and NGCT PAMs, and essentially no activity on sites with NGAG, NGTG, and NGGG PAMs (FIG. 1J).

[0135] To demonstrate directly that our VQR and VRER SpCas9 variants can enable targeting of sites not currently modifiable by wild-type SpCas9, we tested their activities on endogenous genes in zebrafish embryos and human cells. In single cell zebrafish embryos, we found that the VQR variant could efficiently modify endogenous gene sites bearing NGAG PAMs with mean mutagenesis frequencies of 20 to 43% (FIG. 2A) and that the indels originated at the predicted cleavage sites (FIG. 15). In human cells, we found that the VQR variant robustly modified 16 sites across four different endogenous genes that harbored NGAG, NGAT, and NGAA PAMs (range of 6 to 53%, mean of 33%; FIG. 2B and FIG. 16A). Importantly, we verified that wild-type SpCas9 was unable to efficiently alter most of the same sites with NGAG and NGAT PAMs in zebrafish and human cells (FIGS. 2A and 2C), yet was able to efficiently modify nearby sites bearing NGG PAMs (FIG. 16B). Similarly, when examining VRER variant activity at nine sites with NGCG PAMs across three endogenous human genes, we also observed robust mean disruption frequencies (range of 5 to 36%, mean of 21%; FIG. 2D). Consistent with our site-depletion data (FIGS. 1E & 1F), the VQR variant altered NGCG PAM sites efficiencies similar to that observed with the VRER variant, while wild-type SpCas9 was unable to do so (FIG. 2D). Computational analysis of the reference human genome sequence shows that the addition of our VQR and VRER SpCas9 variants doubles the range of potential target sites compared with what was previously possible with only wild-type SpCas9 (FIG. 2E). Taken together, these results demonstrate that our engineered SpCas9 variants expand the targeting range of SpCas9 by enabling modification of previously inaccessible endogenous sites in zebrafish embryos and human cells.

[0136] To determine the genomewide specificity of our VQR and VRER SpCas9 nucleases, we used the recently described GUIDE-seq (Genome-wide Unbiased Identification of Double-stranded breaks Enabled by sequencing) method¹⁰ to profile off-target cleavage events of these SpCas9 variants in human cells. We profiled the genome-wide activities of the VQR and VRER SpCas9 variants using a total of 13 different sgRNAs (eight for VQR and five for VRER from FIGS. 2B and 2D, respectively), which we had shown could induce high efficiencies of modification at their intended on-target sites. These GUIDE-seq experiments yielded a number of important observations: The numbers of off-target DSBs induced by our SpCas9 variants in human cells are comparable to (or, in the case of the VRER variant, perhaps even better than) what has been previously observed with wild-type SpCas9 (FIG. 2F). We note that the high genome-wide specificities observed with VRER might result both from its restricted specificity for NGCG PAMs and perhaps from the relative depletion of sites with NGCG PAMs in the human genome (FIG. 2E)²¹. 1o Additionally, the off-target sites observed generally possess the expected PAM sequences predicted by our site-depletion experiments, including some tolerance for PAMs “shifted” 3′ by one base (compare PAMs from FIGS. 1F and 1I with those in the sites of FIG. 17). Finally, the position and numbers of mismatches found in the off-target sites of our VQR and VRER SpCas9 variants (FIG. 17) are similar in their distributions to what we previously observed with wild-type SpCas9 for sgRNAs targeted to non-repetitive sequences¹⁰.

[0137] Previous studies have shown that imperfect PAM recognition by SpCas9 can lead to recognition of unwanted sites that contain non-canonical NAG, NGA, and other PAMs in human cells (Hsu et al., Nat Biotechnol 31, 827-832 (2013); Tsai et al., Nat Biotechnol 33, 187-197 (2015); Jiang et al., Nat Biotechnol 31, 233-239 (2013); Mali et al., Nat Biotechnol 31, 833-838 (2013); Zhang et al., Sci Rep 4, 5405 (2014)). Therefore, we were interested in exploring if mutations at or near residues that mediate PAM-interaction might improve SpCas9 PAM specificity. While engineering the VQR variant we had noticed that a D1135E SpCas9 mutant appeared to better discriminate between a canonical NGG PAM and a non-canonical NGA PAM compared to wild-type SpCas9 (FIG. 1C). Given this observation, we comprehensively assessed the PAM recognition profile of this D1135E variant using our site-depletion assay. This experiment revealed a decrease in depletion of non-canonical NAG, NGA, and NNGG PAMs with D1135E SpCas9 relative to wild-type SpCas9 (FIG. 3A). Interestingly, this effect was more prominent for one of the two protospacers we used, suggesting that the impact of the D1135E substitution on non-canonical PAM recognition may vary to some degree in a protospacer-dependent manner. Importantly, we did not observe the emergence of any new non-canonical PAM specificities.

[0138] We next tested whether the improved PAM specificity of D1135E SpCas9 also could be observed in human cells. In direct comparisons of wild-type and D1135E SpCas9 on eight target sites with non-canonical NAG or NGA PAMs, we observed that these sites were consistently less efficiently cleaved by D1135E than by wild-type SpCas9 in the EGFP disruption assay (FIG. 3B, mean fold-decrease in activity of 1.94). Importantly, wild-type and D1135E SpCas9 both showed comparable activities on four EGFP reporter gene sites and six endogenous human gene sites with canonical NGG PAMs (FIGS. 3B and 3C, respectively), demonstrating that the D1135E variant does not appreciably affect cleavage of on-target sites with NGG PAMs (mean fold-decrease in activity of 1.04 across all ten sites). Titration experiments in which we decreased the concentration of Cas9-encoding plasmid transfected into human cells revealed no substantial differences in the activities of wild-type and D1135E SpCas9 when they were targeted to the same sites (FIG. 3D), implying that the increased specificity observed with the D1135E variant is not simply the result of protein destabilization.

[0139] To more directly assess whether the introduction of D1135E could reduce off-target cleavage effects of SpCas9, we used deep-sequencing to compare mutation rates induced by wild-type and D1135E SpCas9 on 25 previously known off-target sites of three different sgRNAs (Hsu et al., Nat Biotechnol 31, 827-832 (2013); Tsai et al., Nat Biotechnol 33, 187-197 (2015); Fu et al., Nat Biotechnol 31, 822-826 (2013)). These 25 sites included off-target sites with various mismatches in the spacer sequence and both canonical NGG and non-canonical PAMs (FIG. 3E). The results of these deep-sequencing experiments revealed that the D1135E variant showed reduced mutation frequencies at 19 of the 22 off-target sites with activity above background indel rates, relative to the mutation frequency observed at the three on-target sites (FIGS. 3E & 3F). Interestingly, these reduced off-target mutation frequencies were observed at many sites with a canonical PAM, suggesting that the gain in specificity with D1135E is not restricted only to sites with non-canonical PAMs. To assess the improvements in specificity associated with D1135E on a genome-wide scale, we performed GUIDE-seq experiments using wild-type and D1135E SpCas9 with three different sgRNAs (two of which were previously known to have off-target sites with canonical and non-canonical PAMs (Hsu et al., Nat Biotechnol 31, 827-832 (2013); Tsai et al., Nat Biotechnol 33, 187-197 (2015); Fu et al., Nat Biotechnol 31, 822-826 (2013)). We observed a generalized improvement in genome-wide specificity when using the D1135E SpCas9 variant compared with wild-type SpCas9 (FIG. 3G). For all three sgRNAs we tested, these improvements in specificity were observed at off-target sites that contained mismatched spacers with canonical or non-canonical PAMs (FIG. 18). Importantly, these GUIDE-seq experiments demonstrated that the introduction of the D1135E mutation does not increase the number of off-target effects induced by SpCas9. Collectively, these results show that the D1135E substitution can increase the global specificity of SpCas9.

[0140] Although all of the experiments described above were performed with SpCas9, there are many Cas9 orthologues from other bacteria that could make attractive candidates for characterizing and engineering Cas9s with novel PAM specificities (Fonfara et al., Nucleic Acids Res 42, 2577-2590 (2014); Ran et al., Nature 520, 186-191 (2015)). To explore the feasibility of doing this, we determined whether two smaller-size orthologues, Streptococcus thermophilus Cas9 from the CRISPR1 locus (St1Cas9) (Deveau et al., J Bacteriol 190, 1390-1400 (2008); Horvath et al., J Bacteriol 190, 1401-1412 (2008)) and Staphyloccocus aureus (SaCas9) (Hsu et al., Cell 157, 1262-1278 (2014); Ran et al., Nature 520, 186-191 (2015)), might also function in our bacterial selection assays. While the PAM of St1Cas9 has previously been characterized as NNAGAA (SEQ ID NO:3) (Esvelt et al., Nat Methods 10, 1116-1121 (2013); Fonfara et al., Nucleic Acids Res 42, 2577-2590 (2014); Deveau et al., J Bacteriol 190, 1390-1400 (2008); Horvath et al., J Bacteriol 190, 1401-1412 (2008)), our attempts to bioinformatically derive the SaCas9 PAM using a previously described approach (Fonfara et al., Nucleic Acids Res 42, 2577-2590 (2014)) failed to yield a consensus sequence (data not shown). Therefore, we used our site-depletion assay to determine the PAM for SaCas9 and, as a positive control, for St1Cas9. These experiments were performed using the two different protospacers and sgRNAs with two different complementarity lengths for each protospacer, resulting in four selections for each Cas9. For St1Cas9, we identified two novel PAMs in addition to the six PAMs that had been previously described (Esvelt et al., Nat Methods 10, 1116-1121 (2013); Fonfara et al., Nucleic Acids Res 42, 2577-2590 (2014); Horvath et al., J Bacteriol 190, 1401-1412 (2008)) (FIG. 4A and FIGS. 19C and 19d, consistent with a recent definition of SaCas9 PAM specificity (Ran et al., Nature 520, 186-191 (2015))). For SaCas9, there was PPDV variability among the four selections mainly due to the restricted PAM preferences observed with one protospacer. As a result, only three PAMs were depleted greater than 5-fold in all four experiments: NNGGGT (SEQ ID NO:4), NNGAAT (SEQ ID NO:6), NNGAGT (SEQ ID NO:5) (FIG. 4B). We did, however, identify many more targetable PAMs with the second protospacer library, implying that SaCas9 might recognize numerous additional PAMs (FIGS. 18C and 18D). Using PAMs identified in our site-depletion experiments (NNAGAA (SEQ ID NO:3) for St1Cas9 and NNGAGT (SEQ ID NO:5) for SaCas9), we found that both St1Cas9 and SaCas9 can function efficiently in the bacterial positive selection system (FIG. 4C), suggesting that their PAM specificities could be modified by mutagenesis and selection.

[0141] Because not all Cas9 orthologues function efficiently outside of their native context (Esvelt et al., Nat Methods 10, 1116-1121 (2013)), we tested whether St1Cas9 and SaCas9 can robustly cleave target sites in human cells. St1Cas9 has been previously shown to function as a nuclease in human cells but on only a few sites (Esvelt et al., 2013; Cong et al., Science 339, 819-823 (2013)). We assessed St1Cas9 activity on sites harboring NNAGAA (SEQ ID NO:3) PAMs using sgRNAs with variable-length complementarity regions and found high activity at three of the five target sites (FIG. 4D). For SaCas9, we observed efficient activity at eight sites harboring NNGGGT (SEQ ID NO:4) or NNGAGT (SEQ ID NO:5) PAMs (FIG. 4E). For both St1Cas9 and SaCas9 no obvious correlation between activity and length of spacer complementarity was observed (FIG. 19E). We next determined whether St1Cas9 and SaCas9 could efficiently modify endogenous loci in human cells. For St1Cas9, 7 out of 11 sites across 4 genes were disrupted efficiently as judged by T7E1 assay (1 to 25%, mean of 13%; FIG. 4F), while SaCas9 displayed somewhat more robust activities at 16 sites tested across 4 genes (1% to 37%, mean of 19%; FIG. 4G). Once again, no distinct trend was observed when considering sgRNA spacer length for St1Cas9 and SaCas9 (FIG. 19F). Collectively, our results show that St1Cas9 and SaCas9 function robustly both in our bacterial-based selection and in human cells, making them attractive candidates for engineering additional SpCas9 variants with novel PAM specificities.

TABLE 3

| | SEQ |
|---|---|
| | ID |
| | NO: |
| Wild-type SpCas9 sequence from K1097-D1368 of SEQ ID NO: 1 | |
| KTEVQTGGFSKESILPKRNSDKLIARKKDWDPKKYGGFDSPTVAYSVLVVAKVEKGKSKKLKSVKELLGITI | aa |
| MERSSFEKNPIDFLEAKGYKEVKKDLIIKLPKYSLFELENGRKRMLASAGELQKGNELALPSKYVNFLYLAS | 1097- |
| HYEKLKGSPEDNEQKQLFVEQHKHYLDEIIEQISEFSKRVILADANLDKVLSAYNKHRDKPIREQAENIIHLF | 1368 |
| TLTNLGAPAAFKYFDTTIDRKRYTSTKEVLDATLIHQSITGLYETRIDLSQLGGD | of SEQ |
| | ID |
| | NO: 1 |
| Selected mutant clones for VQR and EQR variant, sequence from K1097-D1368 | |
| KTEVQTGGFSKESILPKRNSDKLIARKKDWDPKKYGGFDSPTVAYSVLVVAKVEKGKSKKLKSVKELLGITI | 431. |
| MERSSFEKNPIDFLEAKGYKEVKKDLIIKLPKYSLFELENGRKRMLASAGELQKGNELALPSKYVNFLYLAS | |
| HYEKLKGSPEDNEQKQLFVEQHKHYLDEIIEQISEFSKRVILADANLDKVLSAYNKHRDKPIREQAENIIHLF | |
| TLTNLGAPAAFKYFDTTIDRKRYTSTKEVLDATLIHQSITGLYETRIDLSQLGGD | |
| KTEVQTGGFSKESILPKRNSDKLIARKKDWDPKKYGGFYSPTVAYSVLVVAKVEKGKSKKLKSVKELLGITI | 432. |
| MERSSFEKNPIDFLEAKGYKEVKKDLIIKLPKYSLFELENGRKRMLASAGELQKGNELALPSKYVNFLYLAS | |
| HYEKLKGSPEDNEQKQLFVEQHKHYLDEIIEQISEFSKRVILADANLDKVLSAYNKHRDKPIREQAENIIHLF | |
| TLTNLGAPAAFKYFDTTIDRKRYISTKEVLDATLIHQSITGLYETRIDLSQLGGD | |
| KTEVQTGGFSKESILPKRNSDKLIARKKDWDPKKYGGFNSPTVAYSVLVVAKVEKGKFKKLKSVKELLGITI | 433. |
| MERSSFEKNPIDFLEAKGYKEVKKDLIIKLPKYSLFELENGRKRMLASAGELQKGNELALPSKYVNFLYLAS | |
| HYEKLKGSPEDNEQKQLFVEQHKHYLDEIIEQISEFSKRVILADANLDKVLSAYNKHRDKPIREQAENIIHLF | |
| TLTNLGAPAAFKYFDTTIDRKQYTSTKEVLDATLIHQSITGLYETRIDLSQLGGD | |
| KTEVQTGGFSKESILPKRNSDKLIARKKDWDPKKYGGFYSPTVAYSVLVVAKVEKGKSKKLKSVKELLGITI | 434. |
| MERSSFEKNPIDFLEAKGYKEVKKDLIIKLPKYSLFELENGRKRMLASAGELQKGNELALPSKYVNFLYLAS | |
| HYEKLKGSPEDNEQKQLFVEQHKHYLDEIIEQISEFSKRVILADANLDKVLSAYNKHRDKPIREQAENIIHLF | |
| TLTNLGAPAAFKYFDTTIDRKRYTSTKEVLDATLIHQSITGLYETRIDLSQLGGD | |
| KTEVQTGGFSKESILPKRNSDKLIARKKDWDPKKYGGFNSPTVAYSVLVVAKVEKGKSKKLKSVKELLGITI | 435. |
| MERSSFEKNPIDFLEAKGYKEVKKDLIIKLPKYSLFELENGRKRMLASAGELQRGNELALPSKYVNFLYLAS | |
| HYEKLKGSPEDNEQKQLFVEQHKHYLDEIIEQISEFSKRVILADANLDKVLSAYNKHRDKPIREQAENIIHLF | |
| TLTNLGAPAAFKYFDTTIDRKRYTSTKEVLDATLIHQSITGLYETRIDLSQLGGD | |
| KTEVQTGGFSKESILPKRNSDKLIARKKDWDPKKYGGFVSPTVAYSVLVVAKVEKGKSKKLKSVKELLGITI | 436. |
| MERSSFEKNPIDFLEAKGYKEVKKDLIIKLPKYSLFELENGRKRMLASAGELQKGNELALPSKYVNFLYLAS | |
| HYEKLKGSPEDNEQKQLFVEQHKHYLDEIIEQISEFSKRVILADANLDKVLSAYNKHRDNPIREQAENIIHL | |
| FTLTNLGAPAAFKYFDTTIDRKRYTSTKEVLDATLIHQSITGLYETRIDLSQLGGD | |
| KTEVQTGGFSKESILPKRNSDKLIARKKDWDPKKYGGFDSPTVAYSVLVVAKVEKGKSKKLKSVKELLGITI | 437. |
| MERSSFEKNPIDFLEAKGYKEVKKDLIIKLPKYSLFELENGRKRMLASAGELQKGNELALPSKYVNFLYLAS | |
| HYEKLKGSPEDNEQKQLFVEQHKHYLDEIIEQISEFSKRVILADANLDKVLSAYNKHRDKPIREQAENIIHLF | |
| TLTNLGAPAAFKYFDTPIDRKRYTSTKEVLDATLIHQSITGLYETRIDLSQLGGD | |
| KTEVQTGGFSKESILPKRNSDKLIARKKDWDPKKYGGFYSPTVAYSVLVVAKVEKGKSKKLKSVKELLGITI | 438. |
| MERSSFEKNPIDFLEAKGYKEVKKDLIIKLPKYSLFELENGRKRMLASAGELQKGNELALPSKYVNFLYLAS | |
| HYEKLKGSPEDNEQKQLFVEQHKHYLDEIIEQISEFSKRVILADANLDKVLSAYNKHRDKPIREQAENIIHLF | |
| TLTNLGAPAAFKYFDTTIDRKQYTSTKEVLDATLIHQSITGLYETRIDLSQLGGD | |
| KTEVQTGGFSKESILPKRNSDKLIARKKDWDPKKYGGFVSPTVAYSVLVVAKVEKGKSKKLKSVKELLGITI | 439. |
| MERSSFEKNPIDFLEAKGYKEVKKDLIIKLPKYSLFELENGRKRMLASAGELQKGNELALPSKYVNFLYLAS | |
| HYEKLKGSPEDNEQKQLFVEQHKHYLDEIIEQISEFSKRVILADANLDKVLSAYNKHRDKPIREQAENIIHLF | |
| TLTKLGAPAAIKYFDTTIDRKQYTSTKEVLDATLIHQSITGLYETRIDLSQLGGD | |
| KTEVQTGGFSKESILPKRNSDKLIARKKDWDPKKYGGFYSPTVAYSVLVVAKVEKGKSKKLKSVKELLGITI | 440. |
| MERSSFEKNPIDFLEAKGYKEVKKDLIIKLPKYSLFELENGRKRMLASAGELQKGNELALPSKYVNFLYLAS | |
| HYEKLKGSPEDNEQKQLFVEQHKHYLDEIIEQISEFSKRVILADANLDKVLSAYNKHRDKPIREQAENIIHLF | |
| TLTNLGAPAAFKYFDTTIDRKQYTSTKEVLEATLIHQSITGLYETRIDLSQLGGD | |
| KTEVQTGGFSKESILPKRNSDKLIARKKDWDPKKYGGFYSPTVAYSVLVVAKVEKGKSKKLKSVKELLGITI | 441. |
| MERSSFEKNPMDFLEAKGYKEVKKDLIIKLPKYSLFELENGRKRMLASAGELQKGNELALPSKYVNFLYLA | |
| SHYEKLKGSPEDNEQKQLFVEQHKHYLDEIIEQISEFSKRVILADANLDKVLSAYNKHRDKPIREQAENIIHL | |
| FTLTNLGAPAAFKYFDTTIDRKQYTSTKEVLDATLIHQSITGLYETRIDLSQLGGD | |
| KTEVQTGGFSKESILPKRNSDKLIARKKDWDPKKYGGFVSPTVAYSVLVEAKVEKGKSKKLKSVKELLGITI | 442. |
| MERSSFEKNPIDFLEAKGYKEVKKDLIIKLPKYSLFELENGRKRMLASAGELQKGNELALPSKYVNFLYLAS | |
| HYEKLKGSPEDNEQKQLFVEQHKHYLDEIIEQISEFSKRVILADANLDKVLSAYNKHRDKPIREQAENIIHLF | |
| TLTNLGAPAAFKYFDTTIDRKQYTSTKEVLDATLIHQSITGLYETRIDLSQLGGD | |
| KTEVQTGGFSKESILPKRNSDKLIARKKDWDPKKYGGFESPTVAYSVLVVAKVEKGKSKKLKSVKELLGITI | 443. |
| MERSSFEKNPIDFLEAKGYKEVKKDLIIKLPKYSLFELENGRKRMLASAGELQKGNELALPFKYVNFLYLAS | |
| HYEKLKGSPEDNEQKQLFVEQHKHYLDEIIEQISEFSKRVILADANLDKVLSAYNKHRDKPIREQAENIIHLF | |
| TLTNLGAPSAFKYFDTTIDRKQYRSTKEVLDATLIHQSITGLYETRIDLSQLGGD | |
| KTEVQTGGFSKESIFPKRNSDKLIARKKDWDPKKYGGLYSPTVAYSVLVVAKVEKGKSKKLKSVKELLGITI | 444. |
| MERSSFEKNPIDFLEAKGYKEIKKDLIIKLPKYSLFELENGRKRMLASAGELQKGNELALPSKYVNFLYLASH | |
| YEKLKGSPEDNEQKQLFVEQHKHYLDEIIEQISEFSKRVILADANLDKVLSAYNKHRDKPIREQAENIIHLFT | |
| LTNLGAPAAFKYFDTTIDRKQYTSTKEVLDATLIHQSITGLYETRIDLSQLGGD | |
| KTEVQTGGFSKESILPKRNSDKLIARKKDWDPKKYGGFYSPTVAYSVLVVAKVEKGKSKKLKSVKELLGITI | 445. |
| MERSSFEKNPIDFLEAKGYKEVKKDLIIKLPKYSLFELENGRKRMLASAGELQKGNELALPSKYVNFLYLAS | |
| HYEKLKGSPEDKEQKQLFVEQHKHYLDEIIEQISEFSKRVILADANLDKVLSAYNKHRDKPIREQAENIIHLF | |
| TLTNLGAPAAFKYFDTTIDRKQYTSTKEVLDATLIHQSITGLYETRIDLSQLGGD | |
| KTEVQTGGFSKESILPKRNSDKLIARKKDWDPKKYGGFYSPTVAYSVLVVAKVEKGKSKKLKSVKELLGITI | 446. |
| MERSSFEKNPIDFLEAKGYKEVKEDLIIKLPKYSLFELENGRKRMLASAGELQKGNELALPSKYVNFLYLAS | |
| HYEKLKGSPEDNEQKQLFVEQHKHYLDEIIEQISEFSKRVILADANLDKVLSAYNKHRDKPICEQAENIIHLF | |
| TLTNLGAPAAFKYFDTTIDRKQYTSTKEVLDATLIHQSITGLYETRIDLSQLGGD | |
| KTEVQTGGFSKESILPKRNSDKLIARKKDWDPKKYGGFYSPTVAYSVLVVAKVENRKSKKLKSVKELLGITI | 447. |
| MERSSFEKNPIDFLEAKGYKEVKKDLIIKLPKYSLFELENGRKRMLASARELQKGNELALPSKYVNFLYLAS | |
| HYEKLKGSPEDNEQKQLFVEQHKHYLDEIIEQISEFSKRVILADANLDKVLSAYNKHRDKPIREQAENIIHLF | |
| TLTNLGAPAAFKYFDATIDRKQYTSTKEVLDATLIHQSITGLYETRIDLSQLGGD | |
| KTEVQTGGFSKESILPKRNSDKLIARKKDWDPKKYGGFVSPTVAYSVLVVANVEKGKSKKLKSVKELLGITI | 448. |
| MERSSFEKNPIDFLEAKGYKEVKKDLIIKLPKYSLFELENGRKRMLASAGELQKGNELALPSKYVNFLYLAS | |
| HYEKLKGSPEDNEQKQLFVEQHKHYLDEIIEQISEFSKRVILTDANLDKVLSAYNKHRDKPIREQAENIIHLF | |
| TLTNLGAPAAFKYFDTTIDRKQYTSTKEVLDATLIHQSITGLYETRIDLSQLGGD | |
| KTEVQTGGFSKESILPKRNSDKLIARKKDWDPKKYGGFYSPTVAYSVLVVAKVEKGKSKKLKSVKELLGITI | 449. |
| MERSSFEKNPIDFLEAKGYKEVKKDLIIKLPKYSLFELENGRKRMLASAGELQKGNELALPSKYVNFLYLAS | |
| HYEKLKGSLEDNEQKQLFVEQHRHYLDEIIEQISEFSKRVILADANLDKVLSAYNKYRDKPIREQAENIIHLF | |
| TLTNLGAPAAFKYFDTTIDRKQYTSTKEVLDATLIHQSITGLYETRIDLSQLGGD | |
| KTEVQTGGFSKESILPKRNSDKLIARKKVWDPKKYGGFYSPTVAYSVLVVAKVEKGKSKKLKSVKELLGITI | 450. |
| MERSSFEKNPIDFLEAKGYKEVKKDLIIKLPKYSLFELENGRKRMLASAGELQKGNELALPSKYVNFLYLAS | |
| HYEKLKGSPEDNEQKQLFVEQHKHYLDEIIEQISEFSKRVILADANLDKVLSAYNKHRDKPIREQAENIIHLF | |
| TLTNLGAPAAFKYFDTTIDRKQYTSTKEVLDATLIHQSITGLYETRIDLSQLGGD | |
| KTEVQTGGFSKESILPKRNSDKLIARKKDWDPKKYGGFYSPTVAYSILVVAKVEKGKSKKLKSVKELLGITI | 451. |
| MERSSFEKNPIDFLEAKGYKEVKKDLIIKLPKYSLFELENGRKRMLASAGELQKGNELALPSKYVNFLYLAS | |
| HYEKLKGSPEDNEQKQLFVEQHKHYLDEIIEQISEFSKRVILADANLDKVLSAYNKHRDKPIREQAENIIHLF | |
| TLTNLGAPAAFKYFDTTIDRKQYTSTKEVLDATLIHQSITGLYETRIDLSQLGGD | |
| KTEVQTGRFSKESILPKRNSDKLIARKKDWDPKKYGGFNSPTVAYSVLVVAKVEKGKSKKLKSVKELLGITI | 452. |
| MERSSFEKNPIDFLEAKGYKEVKKDLIIKLPKYSLFELENGRKRMLASAGELQKGNELALPSKYVNFLYLAS | |
| HYEKLKGSPEDNEQKQLFVEQHKHYLDEIIEQISEFSKRVILADANLDKVLSAYNKHRDKPIREQAENIIHLF | |
| TLTNLGAPAAFKYFDTTIDRKQYTSTKEVLDATLIHQSITGLYETRIDLSQLGGD | |
| KTEVQTGGFSKESILPKRNSDKLIARKKDWDPKKYGGFYSPTVAYSVLVVAKVEKGKSKKLKSVKELLGITI | 453. |
| MERSSFEKNPIDFLEAKGYKEVKKDLIIKLPKYSLFELENGRKRMLASAGELQKGNELALPSKYVNFLYLAS | |
| HYEKLKGSPEDNEQKQLFVEQHKHYLDEIIEQISEFSKRVILADANLDKVLSAYNKHRDKPIHEQAENIIHL | |
| FTLTNLGAPAAFKYFDTTIDRKQYTSTKEVLDATLIHQSITGLYETRIDLSQLGGD | |
| KTEVQTGGFSKESILPKRNSDKLIARKKDWDPKKYGGFYSPTVAYSVLVVAKVEKGKSKKLKSVKELLGITI | 454. |
| MERSSFEKNPIDFLEAKGYKEVKKDLIIKLPKYSLFELENGRKRMLASAGELQKGNELALPSKYVNFLYLAS | |
| HYEKLKGSPEDNEQKQLFVEQHKHYLDEIIEQISEFSKRVILADANLDKVLSAYNKHRDKPIREQAENIIHLF | |
| TLTNLGAPAAFKYFDTTIDRKQYTSTKEVLDATLIHQSITGLYETRIDLSQLGGD | |
| KTEVQTGGFSKESILPKRNSDKLIARKKDWDPKKYGGFYSPTVAYSVLVVAKVEKGKSKKLKSVKELLGITI | 455. |
| MERSSFEKNPIDFLEAKGYKEVKKDLIIKLPKYSLFELENGRKRMLASAGELQKGNELALPSKYVNFLYLAS | |
| HYEKLKGSPEDNEQKQLFVEQHKHYLDEIIEQISEFSKRVILADANLDKVLSAYNKHRNKPIREQAENIIHL | |
| FTLTNLGAPAAFKYFDTMIDRKQYTSTKEVLDATLIHQSITGLYETRIDLSQLVGD | |
| KTEVQTGGFSKESILPKRNSDKLIARKKDWDPKKYGGFYSPTVAYSVLVVAKVEKGKSRKLKSVKELLGITI | 456. |
| MERSSFEKNPIDFLEAKGYKEVKKDLIIKLPKYSLFELENGRKRMLASAGELQKGNELALPSKYVNFLYLAS | |
| HYEKLKGSPEDNEQKQLFVEQHKHYLDEIIEQISEFSKRVILADANLDKVLSAYNKHRDKPIREQAENIIHLF | |
| TLTNLGAPAAFKYFDTTIDRKQYTSTKEVLDATLIHQSITGLYETRIDLSQLGGD | |
| KTEVQTGGFSKESILPKRNSDKLIARKKDWDPKKYGGFYSPTVAYSVLVVAKVEKGKSKKLKSVKELLGITI | 457. |
| MERSSFEKNPIDFLEAKGYKEVKKDLIIKLPKYSLFELENGRKRMLASAGELQKGNELALPSKYVNFLYLAS | |
| HYEKLKGSPEDNEQKQLFVEQHKHYLDEIIEQISEFSKRVILADANLDKVLSAYNKHRDKPIREQAENIIHLF | |
| TLTNLGAPAAFKYFDTTIDRKQYTSTKEVLDATLIHQSITGLYETRIDLSLLGGD | |
| KTEVQTGGFSKESILPNRNSDKLIARKKDWDPKKYGGFDSPTVAYSVLVVAKVEKGKSKKLKSVKELLGITI | 458. |
| MERSSFEKKPIDFLEAKGYKEVKKDLIIKLPKYSLFELENGRKRMLASAGELQKGNELALPSKYVNFLYLAS | |
| HYEKLKGSPEDNEQKQLFVEQHKHYLDEIIEQISEFSKRVILADANLDKVLSAYNKHRDKPIREQAENIIHLF | |
| TLTNLGAPAAFKYFDTTIDRKQYRSTKEVLDATLIHQSITGLYETRIDLSQLGGD | |
| KTEVQTGGFSKESILPKRNSDKLIARKKDWDPKKYGGFYSPTVAYSVLVVAKVKKGKSKKLKSVKELLGITI | 459. |
| MERSSFEKNPIDFLEAKGYKEVKKDLIIKLPKYSLFELENGRKRMLASAGELQKGNELALPSKYVNFLYLAS | |
| HYEKLKGSPEDNEQKQLFVEQHKHYLDEIIEQISEFSKRVILADANLDKVLSAYNKHRDKPIREQAENIIHLF | |
| TLTNLGAPAAFKYFDTTIDRKQYTSTKEVLDATLIHQSITGLYETRIDLSQLGGD | |
| KTEVQTGGFSKESILPKRNSDKLIARKKDWDPKKYGGFNSPTVAYSVLVVAKVEKGKSKKLKSVKELLGITI | 460. |
| MERSSFEKNPIDFLEAKGYKEVKKDLIIKLPKYSLFELENGRKRMLASAGELQKGNELALPSKYVNFLYLAS | |
| HYEKLKGSPEDNEQKQLFVEQHKHYLDEIIEQISEFSKRVILADANLDKVLSAYNKHRDKPIREQAENIIHLF | |
| TLTNLGAPAAFKYFDTTIDRKQYTSTKEVLDATLIHQSITGLYETRIDLSQLGGD | |
| ETEVQTGGFSKESILPKRNSDKLIARKKDWDPKKYGGFDSPTVAFSVLVVAKVEKGKSKKLKSVKELLGITI | 461. |
| MERSFFEKNPIDFLEAKGYKEVKKDLIIKLPKYSLFELENGRKRMLASAGELQKGNELALPSKYVNFLYLAS | |
| HYEKLKGSPEDNEQKQLFVEQHKHYLDEIIEQISEFSKRVILADANLDKVLSAYNKHRDKPIREQAENIIHLF | |
| TLTNLGAPAAFKYFDTTIDRKQYTSTKEVLDATLIHQSITGLYETRIDLSQLGGD | |
| KTEVQTGGFSKESILPKRNSDKLIARKKDWDPKKYGGFYSPTVAYSVLVVAKVEKGKSKKLKSVKDLLGITI | 462. |
| MERSSFEKNPIDFLEAKGYKEVKKDLIIKLPKYSLFELENGRKRMLASAGELQKGNELALPSKYVNFLYLAS | |
| HYEKLKGSPEDNEQKQLFVEQHKHYLDEIIEQISEFSKRVILVDANLDKVLSAYNKHRDKPIREQAENIIHLF | |
| TLTNLGAPAAFKYFDTTIDRKQYTSTKEVLDATLIHQSITGLYETRIDLSQLGGD | |
| KTEVQTGGFSKESILPKRNSDKLIARKKDWDPKKYGGFDSPTVAYSVLVVAKVEKGKSKKLKSVKELLGIT | 463. |
| NMERSSFEKNPIDFLEAKGYKEVKKDLIIKLPKYSLFELENGRKRMLASAEELQKGNELALPSKYVNFLYLA | |
| SHYEKLKGSPEDNEQKQLFVEQHKHYLDEIIEQISEFSKRVILADANLDKVLSAYNKHRDKPIREQAENIIHL | |
| FTLTNLGAPAAFKYFDATIDRKQYRSTKEVLDATLIHQSITGLYETRIDLSQLGGD | |
| KTEVQTGGFSKESILPKRNSDKLIARKKDWDPKKYGGFDSPTVAYSVLVVAKVEKGKSKKLKSVKELLGITI | 464. |
| MERSSFEKNPIDFLEAKGYKEVKKDLIIKLPKYSLFELENGRKRMLASAGELQKGNELALPSKYVNFLYLAS | |
| HYEKLKGSPEDNEQKQLFVEQHKHYLDEIIEQISEFSKRVILADANLDKVLSAYNKHRDKPIREQAENIIHLF | |
| TLTNLGAPAAFKYFDTTIYRKQYTSTKEVLDATLIHQSITGLYETRIDLSQLGGD | |
| KTEVQTGGFSKESILPKRNSDKLIARKKDWDPKKYGGFYSPTVAYSVLVVANVEKGKSKKLKSVKELLGITI | 465. |
| MERSSFEKNPIDFLEAKGYKEVKKDLIIKLPKYSLFELENGRKRMLASAGELQKGNELALPSKYVNFLYLAS | |
| HYEKLKGSPEDNEQKQLFVEQHKHYLDEIIEQISEFSKRVILADANLDKVLSAYNKHRDKPIREQAENIIHLF | |
| TLTDLGAPAAFKYFDTTIDRKQYTSTKEVLDATLIHQSITGLYETRIDLSQLGGD | |
| Selected mutant clones for VRER variant, sequence from K1097-D1368 | |
| KTEVQTGGFSKESILPKRNSDKLIARKKDWDPKKYGGFNSPTVAYSVLVVAKVEKGKSKKLKSVKELLGITI | 466. |
| MERSSFEKNPIDFLEAKGYKEVKKDLIIKLPKYSLFELENGRKRMLASARELQKGNELALPSKYVNFLYLAS | |
| HYEKLKGSPEDNEQKQFFVEQHKHYLDEIIEQISEFSKRVILADANLDKVLSAYNKHRDKPIREQAENIIHL | |
| FTLTNLGAPAAFKYFDTTIDRKEYRSTKEVLDATLIHQSITGLYETRIDLSQLGGD | |
| KTEMQTGGFSKESVLPKRNSDKLIARKKDWDPKKYGGFNSPTVAYSVLVVAKVEKGKSKRLKSVKELLGI | 467. |
| TIMERSSFEKNPIDFLEAKGYKEVKKDLIIKLPKYSLFELENGRKRMLASAGVLQKGNELALPSKYVNFLYLA | |
| SHYEKLKGSPDDNEQKRLFVEQHKHYLDEIIEQISEFSKRVILADANRDKVLSAYNKHRDKPIREQAENIIH | |
| LFTLTNLGAPAAFKYFDTTIDRKEYRSTKEVLDATLIHQSITGLYETRIDLSQLGGD | |
| KTEVQTGGFSKESILPKRNSDKLIARKKDWDPKKYGGFYSPTVAYSVLVVAKVEKGKSKKLKSVKELLGITI | 468. |
| MERSSFEENPIDFLEAKGYKEVKKDLIIKLPKYSLFELENGRKRMLASAGELQKGNELALPSKYVNFLYLAS | |
| HYEKLKGSPKDNEQKQLFVEKHKHYLDEIIEQISEFSKRVILADANLDKVLSAYNKHRDKPIREQAENIIHLE | |
| TLTNLGAPAAFKYFDTTIDRKEYRSTKEVLDATLIHQSITGLYETRIDLSQLGGD | |
| KTEVQTGGFSKESILPKRNSDKLIARKKDWDPKKYGGFNSPTVAYSVLVVANVEKGKSKKLKSVKELLGITI | 469. |
| MERSSYEKNPIDFLEAKGYKEVKKDLIIKLPKYSLFELENGRKRMLASAGVLQKGNELALPSKYVNFLYLAS | |
| HYEKLKGSPEDNEQKQLFVEQHKHYLDEIIEQISEFSKRVILADANLDKVLSAYNKHRDKPIREQAENIIHLF | |
| TLTNLGAPAAFKYFDTTIDRKEYRSTKEVLDATLIHQSITGLYETRIDLSQLGGD | |
| KTEVQTGGFSKESILPKRNSDKLIARKKDWDPKKYGGFVSPTVAYSVLVVAKVEKGKSKKLKSVKELLGITI | 470. |
| MERSSFEKNPIDFLEAKGYKEVKKDLIIKLPKYSLFELENGRKRMLASAGELQKGNELALPSKYVNFLYLAS | |
| HYEKLKGSPEDNEQKQLFVEQHKHYLDEIIEQISEFSKRVILADANLDKVLSAYNKHRDKPIREQAENIIHLF | |
| TLTNLGAPAAFKYFDTTIDRKQYRSTKEVLDATLIHQSFTGLYETRIDLSQLGGD | |
| KTEVQTGGFSKESILPKRNSDKLIARKKDWDPKKYGGFDSPTVAYSVLVVAKVEKGKSKKLKSVKELLGITI | 471. |
| MERSSFEKNPIDFLEAKGYKEVKKDLLIKLPKYSLFELENGRKRMLASARELQKGNELALPSKYVNFLYLAS | |
| HYEKLKGSPEDNEQKQLFVEQHKHYLDEIIEQISEFSKRVILADANLDKVLSAYNKHRDKPIREQAENIIHLF | |
| TLTNLGAPAAFKYFDTTIDRKEYRSTKEVLDATLIHQSITGLYETRIDLSQLGGD | |
| KTEVQTGGFSKESILPKRNSDKLIARKKDWDPKKYGGFNSPTVAYSVLVVAKDEKGKSKKLKSVKELLGITI | 472. |
| MERSSFEKNPIDFLEAKGYKEVKKDLIIKLPKYSLFELENGRKRMLASAGELQKGNELALPSKYVNFLYLAS | |
| HYEKLKGSPEDNEQKQLFVEQHKHYLDEIIEQISEFSKRVILADANLDKVLSAYNKHRDKPICEQAENIIHLF | |
| TLTKLGAPAAFKYFDTTIDRKEYRSTKEVLDATLIHQSITGLYETRIDLSQLGGD | |
| KTEVQTGGFSKESILPKRNSDKVIARKKDWDPKKYGGFDSPTVAYSVLVVAKVEKGKSKKLKSVKELLGITI | 473. |
| MERSSFEKNPIDFLEAKGYKEVKKDLIIKLPKYSLFELENGRKRMLASAGELQKGNELALPSKYVNFLYLAS | |
| HYEKLKGSPEDNEQKQLFVEQHKHYLDEIIEQISEFSKRVILADANLDKVLSAYNKHRDKPIREQAENIIHLF | |
| TLTNLGAPAAFKYFDTTIDRKEYRSTKEVLDATLIHQSITGLYETRIDLSQLGGD | |
| KTEVQTGGFSKESILPKRNSDKLIARKKDWDPKKYGGFYSPIVAYSVLVVAKVEKGKSKKLKSVKELLGITI | 474. |
| MERSSFEKNPIDFLEAKGYKEVKKDLIIKLPKYSLFELENGRKRMLASAGVLQKGNELALPSKYVNFLYLAS | |
| HYEKLKGSPEDNEQKQLFVEQHKHYLDEIIEQISEFSKRVILADANLDKVLSAYNKHRDKPIREQAENIIHLF | |
| TLTNLGAPAAFKYFDTTIDRKEYRSTKEVLDATLIHQSITGLYETRIDLSQLGGD | |
| KTEVQTGGFSKESILPKRNSDKLIARKKDWDPKKYGGFYSPTVAYSVLVVAKVEKGKSKKLKSVKELLGITI | 475. |
| MERSSFEKNPIDFLEAKGYKEIKKDLIIKLPKYSLFELENGRKRMLASAGELQKGNELALPSKYVNFLYLASH | |
| YEKLKGSPEDNEQKQLFVEQHKHYLDEIIEQISEFSKRVILADANLDKVLSAYNKHRDKTIREQAENTIHLF | |
| TLTNLGAPAAFKYFDTTIDRKEYRSTKEVLDATLIHQSITGLYETRIDLSQLGGD | |
| KTEVQTGGFSKESILPKRNSDKLIARKKDWDPKKYGGFYSPTVAYSVLVVAKVEKGKSKKLKSVKELLGITI | 476. |
| MERSSFEKNPIDFLEAKGYKEVKKDLIIKLPKYSLFELENGRKRMLASAGELQKGNELALPSKYVNFLYLAS | |
| HYEKLKGSPEDNEQKQLFVEQHKHYLDEIIEQISEFSKRVILADANLDKVLSAYNKHRDKPIREQAENIIHLF | |
| TLTNLGAPAAFKYFDTTIDRKEYRSTKEVLDATLIHHSITGLYETRIDLSQLGGD | |
| KTEVQTGGFSKESILPKRNSDKLIARKKDWDPKKYGGFYSPTVAYSVLVVAKVEKGKSKKLKSVKELLGITI | 477. |
| MERSSFEKNPIDFLEAKGYKEVKKDLIIKLPKYSLFELENGRKRMLASAGELQKGNELALPSKYVNFLYLAS | |
| HYEKLKGSPEDNEQKQLFVEQHKHYLDEIIEQISEFSKRVILADGNLDKVLSAYNKHRDKPIREQAENIIHL | |
| FTLTNLGAPAAFKYFDTTIDRKEYRSTKEVLDATLIHQSITGLYETRIDLSQLGGD | |
| KTEVQTGGFSKESILPKRNSDKLIARKKDWDPKKYGGFDSPTVAYSVLVVAKVEKGKSKKLKSVKELLGITI | 478. |
| MERSSFEKNPIDFLEAKGYKEVKKDLLIKLPKYNLFELENGRKRMLASAGELQKGNELALPSKYVNFLYLAS | |
| HYEKLKGSPEDNEQKQLFVEQHKHYLDEIIEQISEFSKRVILADANLDKVLSAYNKHRDKPIREQAENIIHLF | |
| TLTNLGAPAAFKYFDTTIDRKQYRSTKEVLDATLIHQSITGLYETRIDLSQLGGD | |
| KTEVQTGGFSKESILPKRNSDKLIARKKDWDPKKYGGFNSPTVAYSVLVVAKVEKGKSKKLKSVKELLGITI | 479. |
| MERSSFEKNPIDFLEAKGYKEVKKDLIIKLPKYSLFELENGRKRMLASAGELQKGNELALPSKYVNFLYLAS | |
| HYEKLKGSPDYNEQKQLFVEQHKHYLDEIIEQISEFSKRVILADANLDKVLSAYNKHRDKPIREQAENIIHLF | |
| TLTNLGAPAAFKYFDTTIDRKEYRSTKEVLDATLIHQSITGLYETRIDLSQLGGD | |
| KTEVQTGGFSKESILPKRNSDKLIARKKDWDPKKYGGFDSPKVAYSVLVVAKVEKGKSKKLKSVKELLGITI | 480. |
| MERSSFEKNPIDFLEAKGYKEVKKDLIIKLPKYSLFELENGRKRMLASAGELQKGNELALPSKYVNFLYLAS | |
| HYEKLKGSPEDNEQKQLFVEQHKHYLDEIIEQISEFSKRVILADANLDKVLSAYNKHRDKPIREQAENIIHLF | |
| TLTNLGAPAAFKYFDTTIDRKQYRSTKEVLDATLIHQSITGLYETRIDMSQLGGD | |
| KTEVQTGGFSKESILPKRNSDKLIARKKDWDPKKYGGFYSPTVAYSVLVVAKVEKGKSKKLKSVKELLGITI | 481. |
| MERSSFEKNPIDFLEAKGYKEVKKDLIIKLPKYSLFELENGRKRMLASAGELQKGNELALPSKYVNFLYLAS | |
| HYEKLKGSPEDNEQKQLFVEQHKHYLDEIIEQISEFSKRVILADANLDKVLIAYNKHRDKPIREQAENIIHLF | |
| TLTNLGAPAAFKYFDTTIDRKEYRSTKEVLDATLIHQSITGLYETRIDLSQLGGD | |
| KTEEQTGGFSKESIHPKRNSDKLIARKKDWDPKKYGGFHSPTVAYSVLVVAKVEKGKSKKLKSVKELLGITI | 482. |
| MERSSFEKNPIDFLEAKGYKEVKKDLIIKLPKYSLFELENGRKRMLASAGELQKGNELALPSKYVNFLYLAS | |
| HYEKLKGSPEDNEQKQLFVEQHKHYLDEIIEQISEFSKRVILADANLDKVLSAYNMHRDKPIREQAENIIHL | |
| FTLTNLGAPAAFKYFDTTIDRKEYRSTKEVLDATLIHQSITGLYETRIDLSQLEGD | |
| KTEVQTGGFSKESILPKRNSDKLIARKKDWDPKKYGGFYSPTVAYSVLVVAKVEKGKSKKLKSVKELLGITI | 483. |
| MERSSFEKNPIDFLEAKGYKEVKKDLIIKLPKYSLFELENGRKRMLASAGELQKGNELALPSKYVNFLYLAS | |
| HYEKLKGSPEDNEQMQLFVEQHKHYLDEIIEQISEFSKRVILADANLDKVLSAYNKHRDKPIREQAENIIHL | |
| FTLTNLGAPAAFKYFDTTIDRKEYRSTKEVLDATLIHQSITGLYETRIDLSQLGGD | |
| KTEVQTGRFSKESILPKRNSDKLIARKKDWDPKKYGGFVSPTVAYSVLVVAKVEKGKSKKLKSVKELLGITI | 484. |
| MERSSFEKNPIDFLEAKGYKEVKKDLIIKLPKYSLFELENGRKRMLASAGELQKGNELALPSKYVNFLYLAS | |
| HYEKLKGSPEDNEQKQLFVEQHKHYLDEIIEQISEFSKRVILADANLDKVLSAYNKHRDKPIREQAENIIHLF | |
| TLTNLGAPAAFKYFDTTIDRKEYRSTKEVLDATLIHQSITGLYETRIDLSQLGGD | |
| KTEVQTGGFSKESILPKRNSDKLIARKKDWDPKKYGGFDSPTVAYSVLVVAKVEKGKSKKVKSVKELLGITI | 485. |
| MERSSFEKNPIDFLEAKGYKEVKKDLIIKLPKYSLFELENGRKRMLASAGVLQKGNELALPSKYVNFLYLAS | |
| HYEKLKGSPEDNEQKQLFVEQHKHYLDEIIEQISEFSKRVILADANLDKVLSAYNKHRDKPIREQAENIIHLF | |
| TLTNLGAPAAFKYFDTTIDRKEYRSTKEVLDATLIHQSITGLYETRIDLSQLGGD | |
| KTEVQTGGFSKESILPKRNSDKLIARKKDWDPKKYGGFYSPTVAYSVLVVAKVEKGKSKKLKSVKELLGITI | 486. |
| MERSSFEKNPIDFLEAKGYKEVKKDLIIKLPKYSLFELENGRKRMLASAGELQKGNELALPSKYVNFLYLAS | |
| HFEKLKGSPEDNEQKQLFVEQHKHYLDEIIEQISEFSKRVILADANLDKVLSAYNKHRDKPIREQAENIIHLF | |
| TLTNLGAPAAFKYFDTMIDRKEYRSTKEVLDATLIHQSITGLYETRIDLSQLGGD | |
| KTEVQTGGFSKESILPKRNSDKLIARKKDWDPKKYGGFVSPTVAYSVLVVAKVEKGKSKKLKSVKELLGITI | 487. |
| MERSSFEKNPIDFLEAKGYKEVKKDLIIKLPKYSLFELENGRKRMLASAGELQKGNELALPSKYVNFLYLAS | |
| HYEKLKGSPEDNEQKQLFVEQPKHYLDEIIEQISEFSKRVILADANLDKVLSAYNKHRDKPIREQAENIIHLF | |
| TLTNLGAPAAFKYFDTTIDRKEYRSTKEVLDATLIHQSITGLYETRIDLSQLGGD | |
| KTEVQTGGFSKESILPKRNSDKLIARKKDWDPKKYGGFVSPTVAYSVLVVAKVEKGKSKKLKSVKELLGITI | 488. |
| MERSSFEKNPIDFLEAKGYKEVKKDLIIKLPKYSLFELENGRKRMLASAGELQKGNEIALPSKYVNFLYLAS | |
| HYEKLKGSPEDNEQKQLFVEQHKHYLDEIIEQISEFSKRVILADANLDKVLSAYNKHRDKPIREQAENIIHLF | |
| TLTNLGAPAAFKYFDTKIDRKEYRSTKEVLDATLIHQSITGLYETRIDLSQLGGD | |
| KTEVQTGGFSKESILPKRNSDKLIARKKDWDPKKYGGFYSPTVAYSVLVVAKVEKGKSKKLKSVKELLGITI | 489. |
| MERSSFEKNPIDFLEAKGYKEVKKDLIIKLPKYSLFELENGRKRMLASAGELQKGNELALPSKYVNFLYLAS | |
| HYEKLKGSPEDNEQKQLFVEQHKHYLDEIIEQISEFSKRVILADANLDKVLSAYNKHRDKPIREQAENIIHLF | |
| TLTNLGAPAAFKYFDTTIDRKEYRSTKEVLDATLIHQSITGLYETRIDLSQLGGD | |
| KTEVQTGGFSKESILPKRNSDKLIARKKDWDPKKYGGFDSPTVAYSVLVVAKVEKGKSKKLKSVKELLGITI | 490. |
| MERSSFEKNPIDFLEAKGYKEVKKDLIIKLPKYSLFELENGRKRMLASAGVLQKGNELALPSKYVNFLYLAS | |
| HYEKLKGSPEDNEQKQLFVEQHKHYLDEIIEQISEFSKRVILADANLDKVLSAYNKHRDKPIREQAENIIHLF | |
| TLTNLGAPAAFKYFDTTIDRKEYRSTKEVLDATLIHQSITGLYETRIDLSQLGGD | |
| KTEVQTGGFSKESILPKRNSDKLIARKKDWDPKKYGGFYSPTVAYSVLVVAKVEKGKSKKLKSVKELLGITI | 491. |
| MERSSFEKNPIDFLEAKGYKEVKKDLIIKLPKYSLFELENGRKRMLASAGELQKGNELALPSKYVNFLYLAS | |
| HYEKLKGSPEDNEQKQLFVEQHKHYLDEIIEQISEFSKRVILADANLDKVLSAYNKHRDKPIREQAENIIHLF | |
| TLTNLGAPAAFKYFDTTIDRKEYRSTKEVLDATLIHQSITGLYETRIDLSQLGGD | |
| KTEVQTGGFSKESILPKRNSDKLIARKKDWDPKKYGGFYSPTVAYSVLVVAKVEKGKSKKLKSVKELLGITI | 492. |
| MERSSFEKNPIDFLEAKGYKEVKKDLIIKLPKYSLFELENGRKRMLASAGELQKGNELALPSKYVNFLYLAS | |
| HYEKLKGSPEDNEQKQLFVEQHKHYLDEIIEQISEFSKRVILADANLDKVLSAYNKHRDKPIREQAENIIHLF | |
| TLTNLGAPAAFKYFDTTIDRKEYRSTKEVLDATLIHQSITGLYETRIDLSQLGGD | |
| KTEVQTGGFSKESILPKRNSDKLIARKKDWDPKKYGGFDSPTVAYSVLVVAKVEKGKSKKLKSVKELLGITI | 493. |
| MERSSFEKNPFDFLEAKGYKEVKKDLIIKLPKYSLFELENGRKRMLASAGELQKGNELALPSKYVNFLYLAS | |
| HYEKLKGSPEDNEQKQLFVEQHKHYLDEIIEQISEFSKRVILADPNLDKVLSAYNKHRDKPIREQAENIIHLF | |
| TLTNLGAPAAFKYFDTTIDRKEYRSTKEVLDATLIHQSITGLYETRIDLSQLGGD | |
| KTEVQTGGFSKESILPKRNSDKLIARKKDWDPKKYGGFLSPTVAYSVLVVAKVEKGKSKKLKSVKELLGITI | 494. |
| MERSSFEKNPIDFLEAKGYKEVKKDLIIKLPKYSLFELENGRKRMLASAGELQKGNELALPSKYVNFLYLAS | |
| HYEKLKGSPEDNEQKQLFVEQHKHYLDEIIEQISEFSKRVILADANLDKVLSAYNKHRDKPIREQAENIIHLF | |
| TLTNLGAPAAFKYFDTTIDRKEYRSTKEVLDATLIHQSITGLYETRIDLSQLGGD | |
| KTEVQTGGFSKESILPKRNSDKLIARKKDWDPKKYGGFDSPTVAYSVLVVAKVEKGKSKKLKSVKELLGITI | 495. |
| MERSSFEKNPIDFLEAKGYKEVKKDLIIKLPKYSLFELENGRKRMLASAGELQKGNELALPSKYVNFLYLAS | |
| HYEKLKGSPEDNEQKQLFVEQHKHYLDEIIEQISEFSKRVILADANLDKVLSAYNKHRDKPIREQAENIIHLF | |
| TLTNLGAPAAFKYFDTTIDRKEYRSTKEVLDATLIHQSITGLYETRIDLSQLGGD | |
| KTEVQTGGFSKESILPKRNSDKLIARKKDWDPKKYGGFYSPTVAYSVLVVAKVEKGKSKKLKSVIELLGITI | 496. |
| MERSSFEKNPIDFLEAKGYKEVKKDLIIKLPKYSLFELENGRKRMLASAGELQKGNELALPSKYVNFLYLAS | |
| HYEKLKGSPEDNEQKQLFVEQHKHYLDEIIEQISEFSKRVILADANLDKVLSAYNKHRDKPIREQAENIIHLF | |
| TLTNLGAPAAFKYFDTTIDRKEYRSTKEVLDATLIHQSITGLYETRIDLSQLGGD | |
| KTEVQTGGFSKESILPKRNSDKLIARKKDWDPKKYGGFYSPTVAYSVLVVAKVEKGKSKKLKSVKELLGITI | 497. |
| MERSSFEKNPIDFLEAKGYKEVKKDLIIKLPKYSLFELENGRKRMLASAGELQKGNELALPSKYVNFLYLAS | |
| HYEKLKGSPEDNEQKQLFVEQHKHYLDEIIEQISEFSKRVILADANLDKVLSAYNKHRDKPIREQAENIIHLF | |
| TLTNLGAPAAFKYFDTTIDRKEYRSTKEVLDATLIHQSITGLYETRIDLSQLGGD | |
| KTEVQTGGFSKESILPKRNSDKLIARKKDWDPKKYGGFDSPTVAYSVLVVAKVEKGKTKKLKSVKELLGITI | 498. |
| MERSSFEKNPIDFLEAKGYKEVIKDFIIKLPKYSLFELENGRKRMLASAGELQKGNELALPSKYVNFLYLASH | |
| YEKLKGSPEDNEQKQLFVEQHKHYLDEIIEQISEFSKRVILADANLDKVLSAYNKHRDKPIREQAENIIHLFT | |
| LTNLGAPAAFKYFDTTIDRKQYRSPKEVLDATLIHQSITGLYETRIDLSQLGGD | |
| KTEVQTGGFSKESILPKRNSDKLIARKKDWDPKKYGGFYSPTVAYSVLVVAKVEKGKSKKLKSVKELLGITI | 499. |
| MERSSFEKNPIDFLEAKGYKEVKKDLIIKLPKYSLFELENGRKRMLASAGELQKGNELALPSKYVNFLYLAS | |
| HYEKLKGSPEDNEQKQLFVEQHKHYLDEIIEQISEFSKRVILADANLDKVLSAYNKHRDKPIREQAENIIHLF | |
| TLTNLGAPAAFKYFDTTIDRKEYRSTKEVLDATLIHQSITGLYETRIDLSQLGGD | |
| KTEVQTGGFSKESILPKRNSDKLIARKKDWDPKKYGGFYSPTVAYSVPVVAKVEKGKSKKLKSVKELLGITI | 500. |
| MERSSFEKNPIDFLEAKGYKEVKKDLIIKLPKYSLFELESGRKRMLASAGELQKGNELALPSKYVNFLYLAS | |
| HYEKLKGSPEDNEQKQLFVEQHKHYLDEIIEQISEFSKRVILADANLDKVLSAYNKHRDKPIREQAENIIHLF | |
| TLTNLGAPAAFKYFDTTIDRKEYRSTKEVLDATLIHQSITGLYETRIDLSQLGGD | |
| KTEVQTGGFSKESILPKRNSDKLIARKKDWDPKKYGGFYSPTVAYSVLVVAKVEKGKSKKLKSVKELLGITI | 501. |
| MERSSFEKNPIDFLEAKGYKEVNKDLIIKLPKYSLFELENGRKRMLASAGELQKGNELALPSKYVNFLYLAS | |
| HYEKLKGSPEDNEQKQLFVEQHKHYLDEIIEQISEFSKRVILADANLDKVLSAYNKHRDKPIREQAENIIHLF | |
| TLTNLGAPAAFKYFDTTIDRKTYRSTKEVLDATLIHQSITGLYETRIDLSQLGGD | |
| KTEVQTGGFSKESILPKRNSDKLIARKKDWDPKKYGGFYSPTVAYSVLVVAKVEKGKSKKLKSVKELLGITI | 502. |
| MERSSFEKNPIDFLEAKGYKEVKKDLIIKLPKYSLFELENGRKRMLASAGELQKGNELALPSKYVNFLYLAS | |
| HYEKLKGSPEDNEQKQLFVEQHKHYLDEIIEQISEFSKRVILADANLDKVLSAYNKHRDKPIHEQAENIIHL | |
| FTLTNLGAPAAFKYFDTTIDRKTYRSTKEVLDATLIHQSITGLYETRIDLSQLGGD | |
| KTEVQTGGFSKESILPKRNSDKLIARKKDWDPKKYGGFDSPTVAYSVLVVAKVEKGKSKKLKSVKELLGITI | 503. |
| MERSSFEKNPIDFLEAKGYKEVKKDLMIKLPKYSLFELKNGRKRMLASAGELQKGNELALPSKYVNFLYLA | |
| SHYEKLKGSPEDNEQKQLFVEQHKHYLDEIIEQISEFSKRVILADANLDKVLSAYNKHRDKPIREQAENIIHL | |
| FTLTKLGAPAAFKYFDTTIDRKTYRSTKEVLDATLIHHSITGLYETRIDLSQLGGD | |
| KTEVQTGGFSKESILPKRNSDKLIARKKDWDPKKYGGFDSPTVAYSVLVVAKVEKGKSKKLKSVKELLGITI | 504. |
| MERSSFEKNPIDFLEAKGYKEVKKDLIIKLPKYSLFELENGRKRMLASARELQKGNELALPSKYVNFLYLAS | |
| HYEKLKGSPEDNEQKQLFVEQHKHYLDEIIEQISEFSKRVILADANLDKVLSAYNKHRDKPIREQAENIIHLF | |
| TLTNLGAPAAFKYFDTTIDRKTYRSTKEVLDATLIHQSITGLYETRIDLSQLGGD | |
| KTEVQTGGFSKESILPKRNSDKLIARKKDWDPKKYGGLYSPTVAYSVLVVAKVEKGKSKKLKSVKELLGITI | 505. |
| MERSSFEKNPIDFLEAKGYKEVKRDLIIKLPKYSLFELKNGRKRMLASAGELQKGNELALPSKYVNFLYLAS | |
| HYEKLKGSPEDNEQKQLFVEQHKHYLDEIIEQISEFSKRVILADANLDKVLSAYNKHRDKPIREQAENIIHLF | |
| TLTNLGAPAAFKYFDTTIDRKTYRSTKEVVDATLIHQSITGLYETRIDLSQLGGD | |
| KTEVQTGGFSKESIHPKRNSDKLIARKKDWDPKKYGGFNSPTVAYSVLVVAKVEKGKSKKLKSVKELLGITI | 506. |
| MERSSFEKNPIDFLEAKGYKEVKKDLIITLPKYSLFELENGRKRMLASAGELQKGNELALPSKYVNFLYLAS | |
| HYEKLKGSPEDNEQKQLFVEQHKHYLDEIIEQISEFSKRVILADSNLDKVLSAYNKHRDKPIREQAENIIHLF | |
| TLTNLGAPAAFKYFDTTIDRKTYRSTKEVLDATLIHQSITGLYETRIDLSQLGGD | |
| KTEVQTGGFSKESILPKGNSDKLIARKKDWDPKKYGGFNSPTVAYSVLVVAKVEKGKSKKLKSVKELLGITI | 507. |
| MERSSFEKNPIDFLEAKGYKEVKKDLIIKLPKYSLFELENGRKRMLASAGELQKGNELALPSKYVNFLYLAS | |
| HYEKLKGSPEDNEQKQLFVEQHKHYLDEIIEQISEFSKRVILADANLDKVLSAYNKHRDKPIREQAENIIHLF | |
| TLTNLGAPAAFKYFDTTIDRKTYRSTKEVLDATLIHQSITGLYETRIDLSQLGGD | |
| KTEVQTGGFSKESILPKRNSDKLIARKKDWDPKKYGGFDSPTVAYSVLVVAKVEKGKSKKLKSVKDLLGITI | 508. |
| MERSSFEKNPIDFLEAKGYKEVKKDLMIKLPKYSLFELENGRKRMLASARELQKGNELALPSKYVNFLYLA | |
| SHYEKLKGSPEDNEQKQLFVEQHKHYLDEIIEQISEFSKRVILADANLDKVLSAYNKHRDKPIREQAENIVH | |
| LFTLTNLGAPAAFKYFDTTIDRKTYRSTKEVLDATLIHQSITGLYETRIDLSQLGGD | |
| KTEVQTGGFSKESILPKRNSDKLIARKKDWDPKKYGGFNSPTVAYSVLVVAKVEKGKSKKLKSVKELLGITI | 509. |
| MERSSFEKNPIDFLEAKGYKEIKKDLIIKLPKYSLFELENGRKRMLASAGELQKGNELALPSKYVNFLYLASH | |
| YEKLKGSPEDNEQKQLFVEQHKHYLDEIIEQISEFSKRVILADVNLDKVLSAYNKHRDKPIREQAENIIHLFT | |
| LTNLGAPAAFKYFDTTIDRKTYRSTKEVLDATLIHQSITGLYETRIDLSQLGGD | |
| KTEVQTGGFSKESIHPKRNSDKLIARKKDWDPKKYGGFDSPTVAYSVLVVAKVEKGKSKKLKSVKELLGITI | 510. |
| MERSSFEKNPIDFLEAKGYKEVKKDLIIKLPKYSLFELENGRKRMLASARELQKGNELALPSKYVNFLYLAS | |
| HYEKLKGSPEDNEQKQLFVEQHKHYLDEIIEQISEFSKRVILADANLDKVLSAYNKDRDKPIREQAENIIHLF | |
| TLTNLGAPAAFKYFDTTIDRKTYRSTKEVLDATLIHQSITGLYETRIDLSQLGGD | |

### Example 2. Engineering the PAM Specificity of Staphylococcus aureus Cas9

[0142] Because we knew what residues of Streptococcus pyogenes Cas9 (SpCas9) were important for PAM recognition (R1333 and R1335), we generated an alignment of Cas9 orthologues to look for homologous residues in the PAM-interacting domain (PI domain) of Staphylococcus aureus Cas9 (SaCas9) (see FIG. 6). We and others have previously shown that the PAM of SaCas9 is NNGRRT (SEQ ID NO: 46) (where N is any nucleotide, and R is an A or G). The preference for a G at the 3^{rd} position of the PAM appeared to be the most strict requirement based on our data, so we hypothesized that positively charged residues like lysine (K) or arginine (R) might be mediating that interaction. As shown in FIG. 6, there are a number of candidate residues in SaCas9 in the homologous region to R1333 and R1335 of SpCas9, including K1101, R1012, R1015, K1018, and K1023.

[0143] We generated alanine (A) and glutamine (Q) substitutions at these five positions to determine if the mutant clones could still cleave a site containing the canonical NNGRRT PAM (SEQ ID NO:46), or possibly cleave the previously non-targetable PAM of NNARRT (SEQ ID NO:43) (FIG. 7). We utilized our bacterial assay (described in the previous patent application), where activity of Cas9 can be visualized by survival of bacterial colonies when plated under a selective condition. The relative activity of Cas9 can be quantified by calculating the ratio of bacterial colonies growing on the selective versus the non-selective media. In FIG. 7, we show that only the R1015A and R1015Q mutations affect the ability of SaCas9 to recognize a canonical NNGAGT (SEQ ID NO:5) PAM, while no mutations enable targeting of NNARRT (SEQ ID NO:43) PAMs (NNAAGT (SEQ ID NO:41) or NNAGGT (SEQ ID NO:42)). These results suggested to us that R1015 plays a role in PAM recognition by SaCas9.

[0144] We then selected randomly mutagenized either wild-type SaCas9, or the R1015Q variant and selected for altered PAM specificity clones against sites containing NNAAGT (SEQ ID NO:41) or NNAGGT (SEQ ID NO:42) PAMs (as previously described for SpCas9). We identified, re-screened, and sequenced a number of mutant clones that could target these PAMs, with their amino acid sequences shown in FIG. 8 (and Table 6). In summary of these sequences, a number of changes appear to be very important for altering SaCas9 specificity (R1015Q, R1015H, E782K), while many other mutations may also contribute (N968K, E735K, K929R, A1021T, K1044N).

[0145] After identifying the positions and mutations essential for altering the PAM specificity of SaCas9 to NNARRT (SEQ ID NO:43), we assessed the contributions of the most abundant mutations to the specificity change by making single, double, and triple mutants combinations (Table 5). When testing these mutations against various PAMs in our positive selection (as previously described), we observed that a number of mutations allowed activity on both a canonical NNGAGT (SEQ ID NO:5) and non-canonical NNAAGT (SEQ ID NO:41) or NNAGGT (SEQ ID NO:42) PAMs, whereas the wild-type SaCas9 enzyme had very low activity on the non-canonical PAMs. Specifically, it appeared as though the triple mutations enabled a relaxed specificity at the third position of the PAM (KKQ, KKH, GKQ, GKH—named based on mutations to positions E782/N968/R1015), leading to a consensus PAM motif of NNRRRT (SEQ ID NO:45) versus the canonical NNGRRT (SEQ ID NO:46). This relaxation of the PAM requirement theoretically doubles the targeting range of SpCas9. Henceforth, variants will be named based on their identities at positions 782, 968, and 1015. For example, E782K/N968K/R1015H would be named the SaCas9 KKH variant.

TABLE 5
SaCas9 mutant activity in the bacterial screen

| | | | NNGAGT | NNAAGT | NNAGGT |
|---|---|---|---|---|---|
| | | | (SEQ ID | (SEQ ID | (SEQ ID |
| mutation(s) | | | NO: 5) | NO: 41) | NO: 42) |
| E782 | N968 | R1015 | % activity | % activity | % activity |
| | | | 100.0 | 21.4 | 15.7 |
| | | Q | 0.0 | 4.3 | 0.0 |
| | | H | 100.0 | 100.0 | 57.1 |
| K | | | 85.7 | 61.4 | 57.1 |
| G | | | 85.7 | 57.1 | 57.1 |
| | K | | 100.0 | 57.1 | 57.1 |
| K | | Q | 85.7 | 92.9 | 85.7 |
| K | | H | 100.0 | 100.0 | 85.7 |
| G | | Q | 71.4 | 85.7 | 71.4 |
| G | | H | 100.0 | 85.7 | 85.7 |
| | K | Q | 85.7 | 85.7 | 85.7 |
| | K | H | 85.7 | 92.9 | 92.9 |
| K | K | | 71.4 | 71.4 | 71.4 |
| G | K | | 85.7 | 71.4 | 71.4 |
| K | K | Q | 100.0 | 100.0 | 100.0 |
| K | K | H | 92.9 | 100.0 | 100.0 |
| G | K | Q | 92.9 | 92.9 | 100.0 |
| G | K | H | 100.0 | 100.0 | 100.0 |

[0146] We next assessed two of the triple mutants in the human cell EGFP disruption assay (as previously described) to determine whether the engineered variants could target non-canonical PAMs in a human cell context (FIG. 9). Variants capable of targeting sites within the EGFP gene containing non-canonical PAMs will disrupt the EGFP coding frame, leading to loss of signal. The results revealed that both the KKQ and KKH mutants retained similar activity to wild-type SaCas9 on canonical NNGRRT (SEQ ID NO:46) PAMs, but had much higher activity on NNARRT (SEQ ID NO:43) PAMs.

[0147] Overall, we've identified mutations in SaCas9 (KKQ or KKH variants) that appear to relax the preference of the wild-type enzyme at the third position of the PAM from a G to an R (A or G). This effectively relaxes the targeting of SaCas9 from an NNGRRT (SEQ ID NO:46) PAM constraint to an NNRRRT (SEQ ID NO:45) PAM.

[0148] Because we had successfully derived variants that could target NNARRT (SEQ ID NO:43) PAMs in human cells, we next asked the question of whether we could engineer variants with specificity for NNCRRT (SEQ ID NO:47) or NNTRRT (SEQ ID NO:48). To do so, we first mutated R1015 to E (in the case of specifying a C at the 3^{rd} position of the PAM) and to L or M (in the case of specifying a T at the 3^{rd} position of the PAM), and tested these against their expected PAMs in our bacterial positive selection assay (previously described) (FIG. 10). We observed that wild-type SaCas9 could inefficiently cleave a site containing an NNCAGT (SEQ ID NO:511) PAM, that an R1015E variant had slightly better activity on the same site, and that wild-type or any of the other directed mutations did not convey activity against other PAMs (FIG. 10). This suggested that as we saw with R1015Q, other mutations would be necessary to engineer SaCas9 variants that could target NNCRRT (SEQ ID NO:47) and NNTRRT (SEQ ID NO:48) PAMs.

[0149] For the SaCas9 evolved variants against NNARRT (SEQ ID NO:43) PAMs, the E782K and N968K mutations were necessary and essential along with the R1015(H/Q). To test whether these mutations would increase the activity of the R1015(E/L/M) variants against their expected PAM, we generated the KKE, KKL, and KKM variants. As shown in FIG. 11, the KKE, KKL, and KKM all had robust activity against their expected PAMs.

[0150] We were also curious as to whether the KKQ, KKH, KKE, KKL, or KKM variants had relaxed specificity against any nucleotide at the 3^{rd} position of the PAM, so we interrogated a number of sites in our bacterial positive selection assay containing NNNRRT PAMs. As shown in FIG. 11, with a few exceptions nearly all of these variants can cleave all sites tested that contain NNNRRT PAMs. This indicated that they had a relaxed specificity at the 3^{rd} position of the PAM as they can efficiently target NNNRRT sites. This is in contrast to the wild-type protein (ENR) that can only efficiently target the NNGAGT (SEQ ID NO:5) site, with very low activity on a few NNNRRT sites. In summary, the KKH (and other similar derivatives shown in FIG. 11) variant can target sites containing NNNRRT PAMs in bacteria, effectively quadrupling the targeting range of SaCas9.

[0151] Thus, the KKH variant (and some of the other variants in FIG. 6) can target NNNRRT PAMs in bacteria, effectively quadrupling the targeting range of SaCas9.

TABLE 6

| | |
|---|---|
| | SEQ |
| residues A652-G1053 of SaCas9 | ID NO: |

Wild Type SaCas9

| | |
|---|---|
| ATRGLMNLLRSYFRVNNLDVKVKSINGGFTSFLRRKWKFKKERNKGYKHHAEDALIIAN | 65. |
| ADFIFKEWKKLDKAKKVMENQMFEEKQAESMPEIETEQEYKEIFITPHQIKHIKDFKDYK | |
| YSHRVDKKPNRKLINDTLYSTRKDDKGNTLIVNNLNGLYDKDNDKLKKLINKSPEKLLMY | |
| HHDPQTYQKLKLILEQYGDEKNPLYKYYEETGNYLTKYSKKDNGPVIKKIKYYGNKLNAH | |
| LDITDDYPNSRNKVVKLSLKPYRFDVYLDNGVYKFVTVKNLDVIKKENYYEVNSKCYEEA | |
| KKLKKISNQAEFIASFYNNDLIKINGELYRVIGVNNDLLNRIEVNMIDITYREYLENMNDK | |
| RPPQIIKTIASKTQSIKKYSTDILGNLYEVKSKKHPQIIKKG | |
| ATRGLMNLLRSYFRVNNLDVKVKSINGGFTSFLRRKWKFKKERNKGYKHHAEDALIIAN | 66. |
| ADFIFKEWKKLDKAKKVMENQMFEEKQAESMPEIETEQEYKEIFITPHQIKHIKDFKDYK | |
| YSHRVDKKPNRKLINDTLYSTRKDDKGNTLIVNNLNGLYDKDNDKLKKLINKSPEKLLMY | |
| HHDPQTYQKLKLIMEQYGDEKNPLYKYYEETGNYLTKYSKKDNGPVIKKIKYYGNKLNA | |
| HLDITDDYPNSRNKVVKLSLKPYRFDVYLDNGIYKFVTVKNMDVIKKENYYEVNSKCYEE | |
| AKKLKKISNQAEFIASFYNNDLIKINGELYRVIGVNNDLLNRIEVNMIDITYREYIENMND | |
| KRPPQIIKTIASKTQSIKKYSTDILGNLYEVKSKKHPQIIKKG | |
| ATRGLMNLLRSYFRVNNLDVKVKSINGGFTSFLRRKWKFKKERNKGYKHHAEDALIIAN | 67. |
| ADFIFKEWKKLDKAKKVMENQMFEEKQAESMPEIETEQEYKEIFITPHQIKHIKDFKDYK | |
| YSHRVDKKPNRELINDTLYSTRKDDKGNTLIVNNLNGLYDKDNDKLKKLINKSPEKLLMY | |
| HHDPQTYQKLKLIMEQYGDEKNPLYKYYEETGNYLTKYSKKDNGPVIKKIKYYGNKLNA | |
| HLDITDDYPNSRNKVVKLSLKPYRFDVYLDNGVYKFVTVRNLDVIKKENYYEVNSKCYEE | |
| AKKLKKISNQAEFIASFYNNDLIKINGELYRVIGVNNDLLNRIEVNMIDITYREYLENMND | |
| KRPPQIIKTIASKTQSIKKYSTDILGNLYEVKSKKHPQVIKKG | |
| ATRGLMNLLRSYFRVNNLDVKVKSINGGFTSFLRRKWKFKKERNKGYKHHAEDALIIAN | 68. |
| ADFIFKEWKRLDKAKKVMENQMFEEKQAESMPEIETEQEYKEIFITPHQIKHIKDFKDYK | |
| YSHRVDKKPNRELINDTLYSTRKDDKGNTLIVNNLNGLYDKDNDKLKKLINKSPEKLLMY | |
| HHDPQTYQKLKLIMEQYGDDKNPLYKYYEETGNYLIKYSKKDNGPVIKKIKYYGNKLNAH | |
| LDITDDYPNSRNKVVKLSLKPYRFDVYLDNGVYKFVTVRNLDVIKKENYYEVNSKCYEEA | |
| KKLKKISNQAEFIAYFYNNDLIKINGELYRVIGVNNDLLNRIEVNMIDITYREYLENMNDK | |
| RPPQIIKTIASKTQSIKKYSTDILGNLYEVKSKKHPQIIK*G | |
| ATRGLMNLLRSYFRVNNLDVKVKSINGGFTRFLRRKWKFKKERNKGYKHHAEDALIIAN | 69. |
| ADFIFKEWKKLDKAKKVMENQMFEEKQAESMPEIETEQEYKEIFITPHQIKHIKDFKDYK | |
| YSHRVDKKPNRKLINDTLYSTRKDDKGNTLIVNNLNGLYDKDNDKLKKLINKSPEKLLMY | |
| HHDPQTYQKLKLIMEQYGDEKNPLYKYYEETGNYLTKYSKKDNGPVIKKIKYYGNKLNA | |
| HLDITDDYPNSRNKVVKLSLKPYRFDVYLDNGVYKFVTVKNLDVIKKENYYEVNSKCYEE | |
| AKKLKKISNQAEFIASFYNNDLIKINGELYRVIGVNNDLLNRIEVNMIDITYREYLENMND | |
| KRPPQIIKTIASKTQSIKKYSTDILGNLYEVKSKKHPQITKKG | |
| ATRGLMNLLRNYFRVNNLDVKVKSINGGFTSFLRRKWKFKKERNKGYKHHAEDALIIAN | 70. |
| ADFIFKEWKKLDKAKKVMENQMFEEKQAESMPEIETEQEYKEIFITPHQIKHIKDFKDYK | |
| YSHRVDKKPNRELINDTLYSTRKDDKGNTLIVNNLNGLYDKDNDKLKKLINKSPEKLLMY | |
| HHDQQTYQKLKLIMEQYGDEKNPLYKYYEETGNYLTKYSKKDNGPVIKKIKYYGNKLNA | |
| HLDITDDYPNSRNKVVKLSLKPYRFDVYLDNGVYKFVTVKNLDVIKNENYYEVNSKCYEE | |
| AKKLKKISNQAEFIASFYNNDLIKINGELYRVIGVNNDLLNRIEVNMIDITYREYLENMND | |
| KRPPQNIKTIASKTQSIKKYSTDILGNLYEVKSKKHPQII*KG | |
| ATRGLMNLLRSYFRVNNLDVKVKSINGGFTSFLRRKWKFKKERNKGYKHHAEDALIIAN | 71. |
| ADFIFKEWKKLDKAKKVMENQMFEEKQAESMPEIETEQEYKEIFITPHQIKHIKDFKDYK | |
| YSHRVDKKPNRKLINDTLYSTRKDDKGNTLIVNNLNGLYDKDNDKLKKLINKSPEKLLMY | |
| HHDPQTYQKLKLIMEQYGDEKNPLYKYYEETGYYLTKYSKKDNGPVIKKIKYYGNKINAH | |
| LDITDDYPNSRNKVVKLSLKPYRFDVYLDNGVYKFVTVKNLDVIKKENYYEVNSKCYEEA | |
| KKLKKISNQAEFIASFYNNDLIKINGELYRVIGVNNDLLNRIEVNMIDITYREYLENMNDK | |
| RPPQIIKTIASKTQSIKKYSTDILGNLYEVKSKKHPQIVKKG | |
| ATRGLMNLLRSYFRVNNLDVKVKSINGGFTSFLRRKWKFKKERNKGYKHHAEDALIIAN | 72. |
| ADFIFKEWKKLDKAKKVMENQMFEEKQAESMPEIETEQEYKEIFITPHQIKHIKDFKDYK | |
| YSHRVDKKPNRELINDTLYSTRKDDKGNTLIVNNLNGLYDKDNDKLKKLINKSPEKLLMY | |
| HHDPQTYQKLKLIMEQYGDEKNPLYKYYEETGNYLTKYSKKDNGPVIKKIKYYGNKLNA | |
| HLDITDDYPNSRNKVVKLSLKPYRFDVYLDNGVYKFVTVKNLDVIKKENYYEVNSKCYEE | |
| AKKLKKISNQAEFIASFYNNDLIKINGELYRVIGVNNDLLNRIEVNMIDITYREYLENMND | |
| KRPPQIIKTIASKTQSIKKYSTDILGNLYEVKSKKHPQIIKKG | |
| ATRGLMNLLRSYFRVNNLDVKVKSINGGFTSFLRRKWKFKKERNKGYKHHAEDALIIAN | 73. |
| ADFIFKEWKKLDKAKKVMENQMFEEKQAESMPEIETEQEYKEIFITPHQIKHIKDFKDYK | |
| YSHRVDKKPNRELINDTLYSTRKDDKGNTLIVNNLNGLYDKDNDKLKKLINKSPEKLLMY | |
| HHDPQTYQKLKLIMEQYGDEKNPLYKYYEETGNYLTKYSKKDNGPVIKKIKYYGNKLNA | |
| HLDITDDYPNSRNKVVKLSLKPYRFDVYLDNGVYKFVTVKNLDVIKKENYYEVNSKCYEE | |
| AKKLKKISNQAEFIASFYKNDLIKINGELYRVIGVNNDLLNRIEVNMIDITYREYLENMND | |
| KRPPQIIKTIASKTQSIKKYSTDILGNLYEVKSKKHPQIIKKG | |
| ATRGLMNLLRSYFRVNNLDVKVKSINGGFTSFLRRKWKFKKERNKGYKHHAEDALIIAN | 74. |
| ADFIFKEWKKLDKAKKLMENQMFEEKQAESMPEIETEQEYKEIFMTPHQIKHIKDFKDY | |
| KYSHRVDKKPNRELINDTLYSTRKDDKGNTLIVNNLNGLYDKDNDKLKKLINKSPEKLLM | |
| YHHDPQTYQKLKLIMEQYGDEKNPLYKYHEETGNYLTKYSKKDNGPVIKKIKYYGNKLN | |
| AHLDITDDYPNSRNKVVKLSLKPYRFDVYLDNGVYKFVTVKNLDVIKKENYYEVNSKCYE | |
| EAKKLKKISNQAEFIASFYNNDLIKINGELYRVIGVNNDLLNRIEVNMIDITYREYLENMN | |
| DKRPPHIIKTIASKTQSIKKYSTDILGNLYEVKSKKHPQIIKKG | |
| ATRGLMNLLRSYFRVNNLDVKVKSINGGFTSFLRRKWKFKKERNKGYKHHAEDALIIAN | 75. |
| ADFIFKEWKKLDKAKKVMENQMFEEKQAESMPEIETEQEYKEIFITPHQIKHIKDFKDYK | and |
| YSHRVDKKPNRELINDTLYSTRKDDKGNTLIVNNLNGLYDKDNDKLKKLINKSPEKLLMY | 966 |
| HHDPQTYQKLKLIMEQYGDEKNPLYKYYEETGNYLTKYSKKDIGPVIKKIKYYGNKLNAH | |
| LDITDDYPNSRNKVVKLSLKPYRFDVYLDNGVYKFVTVKNLDVIKKENYYEVNSKCYEEA | |
| KKLKKISNQAEFIASFYNNDLIKINGELYRVIGVNNDLLNRIEVNMIDITYREYLENMNYK | |
| RPPQIIKTIASKTQSIKKYSSDILGNLYEVKSKKHP*IIKKG | |
| ATRGLMNLLRSYFRVNNLDVKVKSINGGFTSFLRRKWKFKKERNKGYKHHAEDALIIAN | 76. |
| ADFIFKEWKKLDKAKKVMENQMFEEKQAESMPEIETEQEYKEIFITPHQIKHIKDFKDYK | |
| YSHRVDKKPNRKLINDTLYSTRKDDKGNTLIVNNLNGLYDKDNDKLKKLINKSPEKLLMY | |
| HHDPQTYQKLKLIMEQYGDEKNPLYKYYEETGNYLTKYSKKDNGPVIKKIKYYGNKLNA | |
| HLDITDDYPNSRNKVVKLSLKPYRFDVYLDNGVYKFVTVKNLDVIKKENYYEVNSKCYEE | |
| AKKLKKISNQAEFIASFYNNDLIKINGELYRVIGVNNDLLNRIEVNMIDITYREYLENMND | |
| KRPPQIINTIASKTQSIKKYSTDILGNLYEVKSKKHPQIIKKG | |
| ATRGLMNLLRSYFRVNNLDVKVKSINGGFTSFLRRKWKFKKERNKGYKHHAEDALIIAN | 77. |
| ADFIFKEWKKLDKAKKVMENQMFEEKQAESMPEIETEQEYKELFITPHQIKHIKDFKDYK | |
| YSHRVDKKPNRELINDTLYSTRKDDKGNTLIVNNLNGLYDKDNDKLKKLINKSPEKLLMY | |
| HHDPQTYQKLKLIMEQYGDEKNPLYKYYEETGNYLTKYSKKDNGPVIKKIKYYGNKLNA | |
| HLDITDDYPNSRNKVVKLSLKPYRFDVYLDNGVYKFVTVKNLDVIKKENYYEVNSKCYEE | |
| AKKLKKISNQAEFIASFYKNDLIKINGELYRVIGVNNDLLNRIEVNMIDITYREYLENMND | |
| KRPPQIIKTIASKTQSIKKCSTDILGNLYEVKSKKHPQIIKKG | |
| ATRGLMNLLRSYFRVNNLDVKVKSINGGFTSFLRRKWKFKKERNKGYKHHAEDALIIAN | 78. |
| ADFIFKEWKKLDKAKKVMENQMFEKKQAESMPEIETEQEYKEIFITPHQIKHIKDFKDYK | |
| YSHRVDKKPNRGLINDTLYSTRKDDKGNTLIVNNLNGLYDKDNDKLKKLINKSPEKLLMY | |
| HHDPQTYQKLKLIMEQYGDEKNPLYKYYEDTGNYLTKYSKKDNGPVIKKIKYYGNKLNA | |
| HLDITDDYPNSRNKVVKLSLKPYRFDVYLDNGVYKFVTVKNLDLIKKENYYEVNSKCYEE | |
| AKKLKKISNQAEFIASFYNNDLIKINGELYRVIGVNNDLLNRIEVNMIDITYREYLENVNDK | |
| RPPQIIKTIASKTQSIKKYSTDILGNLYEVKSKKHPQIIKKG | |
| ATRGLMNLLRSYFRVNNLDVKVKSINGGFTSFLRRKWKFKKERNKGYKHHAEDALIIAN | 79. |
| ADFIFKEWKKLDKAKKVMENQMFEEKQAESMPEIETEQEYKEIFITPHQIKHIKDFKDYK | |
| YSHRVDKKPNRKLINDTLYSTRKDDKGNTLIVNNLNGLYDKDNDKLKKLINKSPEKLLMY | |
| HHDPQTYQKLKLIMEQYGDEKNPLYKYYEETGNYLTKYSKKDNGPVIKKIKYYGNKLNA | |
| HLDITDDYPNSRNKVVKLSLKPYRFDVYLDNGIYKFVTVKNLDVIKKENYYEVNSKCYEKA | |
| KKLKKISNQAEFIASFYNNDLIKINGELYRVIGVNNDLLNRIEVNMIDITYREYLENMNDK | |
| RPPQIIKTIASKTQSIKKYSTDILGNLYEVKSNKHPQIIKKG | |
| ATRGLMNLLRSYFRVNNLDVKVKSINGGFTSFLRRKWKFKKERNKGYKHHAEDALIIAN | 80. |
| ADFIFKEWKKLDKAKKVMENQMFEEKQAESMPEIETEQEYKEIFIIPHQIKHIKDFKDYK | |
| YSHRVDKKPNRKLINDTLYSTRKDDKGNTLIVNNLNGLYDKDNDKLKKLINKSPEKLLMY | |
| HHDPQTYQKLKLIMEQYGDEKNPLYKYYEETGNYLTKYSKKDNGPVIKKIKYYGNKLNA | |
| HLDITDDYPNSRNKVVKLSLKPYRFDVYLDNGVYKFVTVKNLDVIKKENYYEVNSKCYEE | |
| AKKLKKISNQAEFIASFYNNDLIKINGELYRVIGVNNDLLNRIEVNMIDITYREYLENMND | |
| KRPPQIIKTIASKTQSIKKYSTDILGNLYEVKSKKHPQIIKKG | |
| ATRGLMNLLRSYFRVNNLDVKVKSINGGFTSFLRRKWKFKKERNKGYKHHAEDALIIAN | 81. |
| ADFIFKEWKKLDKAKKVMENQMFEEKQAESMPEIETQQEYKEIFITPHQIKHIKDFKDYK | |
| YSHRVDKKPNRKLINDTLYSTRKDDKGNTLIVNNLNGLYDKDNDKLKKLINKSPEKLLMY | |
| HHDPQTYQKLKLIMEQYGDEKNPLYKYYEETGNYLTKYSKKDNGPVIKKIKYYGNKLNA | |
| HLDITDDYPNSRNKVVKLSLKPYRFDVYLDNGVYKFVTVKNLDVIKKENYYEVNSKCYEE | |
| AKKLKKISNQAEFIASYYNNDLIKINGELYRVIGVNNDLLNRIEVKMIDITYREYLENMND | |
| KRPPQIIKTIASKTQSIKKYSTDILGNLYEVKSKKHPHIIKKG | |
| ATRGLMNLLRSYFRVNNLDVKVKSINGGFTSFLRRKWKFKKERNKGYKHHAEDALIIAN | 82. |
| ADFIFKEWKKLDKAKKVMENQMFEEKQAESMPEIETEQEYKEIFITPHQIKHIKDFKDYK | |
| YSHRVDKKPNRKLINDTLYSTRKDDKGNTLIVNILNGLYDKDNDKLKKLINKSPEKLLMYH | |
| HDPQTYQKLKLIMEQYGDEKNPLYKYYEETGNYLTKYSKKDNGPVIKKIRYYGNKLNAHL | |
| DITDDYPNSRNKVVKLSLKPYRFDVYLDNGVYKFVTVKNLDVIKKENYYEVNSKCYEEAK | |
| KLKKISNQAEFIASFYNNDLIKINGELYRVIGVNNDLLNRIEVNMIDITYREYLENMNDKR | |
| PPQIIKTIASKTQSIKKYSTDILGNLYEVKSKKHPQIIKKG | |
| ATRGLMNLLRSYFRVNNLDVKVKSINGGFTSFLRRKWKFKKERNKGYKHHAEDALIIAN | 83. |
| ADFIFKEWKKLDKAKKVMENQMFEEKQAESMPEIETEQEYKEIFITPHQIKHIKDFKDYK | |
| YSHRVDKKPNRKLINDTLYSTRKDDKGNTLIVNNLNGLYDKDNDKLKKLINKSPEKLLMY | |
| HHDPQTYQKLKLIMEQYGDEKNPLYKYYEETGNYLTKYSKKDNGPVIKKIKYYGNKLNA | |
| HLDITDDYPNSRNKVVKLSLKPYRFDVYLDNGVYKFVTVKNLDVIKKENYYEVNSKCYEE | |
| AKKLKKISNQAEFIASFYNNDLIKINGELYRVIGVNNDLLNRIEVNMIDITYREYFENMNV | |
| KRPPQIIKTIASKTQSIKKYSTDILGNLYEVKSKKHPQIIKKG | |
| ATRGLMNLLRSYFRVNNLDVKVKSINGGFTSFLRRKWKFKKERNKGYKHHAEDALIIAN | 84. |
| ADFIFKEWKKLDKAKKVMENQMFEEKQAESMPEIETEQEYKEIFITPHQIKHIKDFKDYK | |
| YSHRVDKKHNRELVNDTLYSTRKDDKGNTLIVNNLNGLYDKDNDKLKKLINKSPEKLLM | |
| YHHDPQTYQKLKLIMEQYGDEKNPLYKYYEETGNYLTKYSKKDNGPVIKKIKYYGNKLNA | |
| HLDITDDYPNSRNKVVKLSLKPYRFDVYLDNGVYKFVTVKNLDVIKKENYYEVNSKCYEE | |
| AKKLKKISNQAEFIASFYNNDLIKINGELYRVIGVNNDLLNRIEVNMIDITYREYLENMND | |
| KRPPQIIKTITSKTQSIKKYSTDILGNLYEVKSKKHPQIIKKG | |
| ATRGLMNLLRSYFRVNNLDVKVKSINGGFTSFLRRKWKFKKERNKGYKHHAEDALIIAN | 85. |
| ADFIFKEWKKLDKAKKVMENQMFEEKQAESMPEIETEQEYKEIFITPHQIKHIMDFKDY | |
| KYSHRVDKKPNRELINDTLYSTRKDEKGNTLIVNNLNGLYDKDNDKLKKLINKSPEKLLM | |
| YHHDPQTYQKLKLIMEQYGDEKNPLYKYYEETGNYLTKYSKKDNGPVIKKIKYYGNKLNA | |
| HLDITDDYPNSRNKVVKLSLKPYRFDVYLDNGVYKFVTVRNLDVIKKENYYEVNSKCYEE | |
| AKKLKKISNQAEFIASFYNNDLIKINGELYRVIGVNNDLLNRIEVNMIDITYREYLENMND | |
| KRPPQIIKTIASKTQSIKKYSTDILGNLYEVKSKKHPQIIKKG | |
| ATRGLMNLLRSYFRVNNLDVKVKSINGGFTSFLRRKWKFKKERNKGYKHHAEDALIIAN | 86. |
| ADFIFKEWKKLDKAKKVMENQMFEEKQAVSMPEIETEQEYKEIFINPHQIKHIKDFKDY | |
| KYSHRVDKKPNRELINDTLYSTRKDDKGNTLIVNNLNGLYDKYNDKLKKLINKSPEKLLM | |
| YHHDPQTYQKLKLIMEQYGDEKNPLYKYYEETGNYLTKYSKKDNGPVIKKIKYYGNKLNA | |
| HLDITDDYPNSRNKVVKLSRKPYRFDVYLDNGVYKFVTVKNLDVIKKENYYEVNSKCYEE | |
| AKKLKKISNQAEFIASFYNNDLIKINGELYRVIGVNNDLLNRIEVNMIDITYREYRENMND | |
| KRPPQIIKTIASKTQSIKKYSTDILGNLYEVKSKKHPQIIKKG | |
| ATRGLMNLLRSYFRVNNLDVKVKSINGGFTSFLRRKWKFKKERNKGYKHHAEDALIIAN | 87. |
| ADFIFKEWKKLDKAKKVMENQMFEEKQAESMPEIETEQEYKEIFITPHQIKHIKDFKDYK | |
| YSHRVDKKPNRELINDTLYSTRKDDKGNTLIVNNLNGLYDKDNDKLKKLINKSPEKLLMY | |
| HHDPQTYQKLKLIMEQYGDEKNPLYKYYEETGNYLTKYSKKDNGPVIKKIKYYGNKLNA | |
| HLDITDDYPNSRNKVVKLSLKPYRFDVYLDNGVYKFVTVKNLDVIKNENYYEVNSKCYEE | |
| AKKLKKISNQAEFIASFYNNDLIKINGELYRVIGVNNDLLNRIEVNMIDITYREYLENINGK | |
| RPPQIIKTITSKTQSIKKYSTDILGNLYEVKSKKHPQIIKKG | |
| ATRGLMNLLRSYFRVNNLDVKVKSINGGFTSFLRRKWKFKKERNNGYKHHAEDALIIAN | 88. |
| ADFIFKEWKKLDKAKKVMENQMFEEKQAESMPEIETEQEYKEIFITPHQIKHIKEFKDYK | |
| YSHRVDKKPNRKLINDTLYSTRKDDKGNTLIVNNLNGLYDKDNDKLKKLINKSPEKLLMY | |
| HHDPQTYQKLKLIMEQYGDEKNPLYKYYEETGIYLTKYSKKDNGPVIKKIKYYGNKLNAH | |
| LDITDDYPNSRNKVVKLSLKPYRFDVYLDNGVYKFVTVKNLDVIKKENYYEVNSKCYGEA | |
| KKLKKISNQAEFIASFYNNDLIKINGELYRVIGVNNDLLNRIEVNMIDITYREYLEIMNDKR | |
| PPQIIKTIASKTQSIKKYSTDILGNLYEVKSNKHPQIIKKG | |
| ATRGLMNLLRSYFRVNNLDVKVKSINGGFTSFLRRKWKFKKERNKGYKHHAEDALIIAN | 89. |
| ADFIFKEWKKLDKAKKVMENQMFEEKQAESMPEIETEQEYKVIFITPHQIKHIKDFKDYK | |
| YSHRVDKKPNRKLINDTLYSTRKDDKGNTLIVNNLNGLYDKDNDKLKKLINKSPEKLLMY | |
| HHDPQTYQKLKLIMEQYGDEKNPLYIYYEETGNYLTKYSKKDNGPVIKKIKYYGNKLNAH | |
| LDITDDYPNSRNKVVKLSLKPYRFDVYLDNGVYKFVTVKNLDVIKKENYYEVNSKCYEEA | |
| KKLKKISNQAEFIASFYNNDLIKINGELYRVIGVNNDLLNRIEVNMIDITYREYLENMNDK | |
| RPPQIIKTIASKTQSIKKYSTDILGNVYEVKSKKHPQIIIKG | |
| ATRGLMNLLRSYFRVNNLDVKVKSINGGFTSFLRRKWKFKKERNKGYKHHAEDALIIAN | 90. |
| ADFIFKEWKKLDKAKKVMENQMFEEKQAESMPEIETGQEYKEIFITPHQIKHIKDFKDYK | |
| YSHRVDKKPNRKLINDTLYSTRKDDKGNTLIVNNLNGLYDKDNDKLKKLINKSPEKLLMY | |
| HHDPQTYQKLKLIMEQYGDEKNPLYKYYEETGNYLTKYSKKDNGPVIKKIKYYGNKLNA | |
| HLDITDDYPNSRNKVVKLSLKPYRFDVYLDNGVYKFVTVKNLDVIKKENYYEVNSKCYEE | |
| AKKLKKISNQAEFIASFYNNDLIKINGELYRVIGVNNDLLNRIEVNMIDITYREYLENMND | |
| KRPPQIIKTIASKTQSIKKYSTDILGNLYEVKSKKHPQIIKKG | |
| ATRGLMNLLKSYFRVNNLDVKVKSINGGFTSFLRRKWKFKKERNKGYKHHAEDALIIAN | 91. |
| ADFIFKEWKKLDKSKKVMENQMFEEKQAESMPEIETEQEYKEIFITPHQIKHIKDFKDYK | |
| YSHRVDKKHNRKLINDTLYSTRKDDKGNTLIVNNINGLYDKDNDKLKKLINKSPEKLLMY | |
| HHDPQTYQKLKLIMEQYGDEKNPLYKYYEETGNYLTKYSKKDNGPVIKKIKYYGNKLNA | |
| HLDITDDYPNSRNKVVKLSLKPYRFDVYLDNGVYKFVTVKNLDVIKKENYYEVNSKCYEE | |
| AKKLKKISNQAEFIASFYNNDLIKINGELYRVIGVNNDLLNRIEVNTIDITYREYLENMNDK | |
| RPPQIIKTIASKTQSIKKYSTDILGNLYEVKPKKHPQIIKKG | |
| ATRGLMNLLRSYFRVNNLDVKVKSINGGFTSFLRRKWKFKKERNKGYKHHAEDALIIAN | 92. |
| ADFIFKEWKKLDKAKKVMENQMFEEKQAESMPEIETEQEYKEIFITPHQIKHIKDFKDYK | and |
| YSHRVDKKPNRKLINDTLYSTREDDKGNTLIVNNLNGLYDKDNDKLKKLINKSPEKLLMY | 966 |
| HHDPQTYQKLKLIMEQYGDEKNPLYKYYEETGNYLTKYSKKDNGPVIKKIKYYGNKLNA | |
| HLDISDDYPNSRNKVVKLSLKPYRFDVYLDNGVYKFVTVKNLDVIKKENYYEVNSKCYEE | |
| AKKLKKISNQAEFIASFYNNDLIKINGELYRVIGVNNDLLNRIEVNMIYITYREYLENMND | |
| KRPPQIIKTIASKTQSIKKYSTDILGNLYEVKSKKHP*IIKKG | |
| ADFIFKEWKKLDKAKKVMENQMFEEKQAESMPEIETEQEYKEIFITPYQIKHIKDFKDYK | |
| YSHRVDKKPNRELINDTLYSTRKDDKGNTLIVNNLNGLYDKDNDKLKKLINKSPEKLLMY | |
| HHDPQTYQKLKLIMEQYGDEKNPLYKYYEETGNYLTKYSKKDNGPVIKKIKYYGNKLNA | |
| HLDITDDYPNSRNKVVKLSLKPYRFDVYLDNGVYKFVTVRNLDVIKKENYYEVNSKCYEE | |
| AKKLKKISNQAEFIASFYNNDLIKINGELYRVIGVNNDLLNRIEVNMIDITYREYLENMND | |
| KRPPQIIKTIASKTQSIKKYSTDILGNLYEVKSKKHPQIIKKG | |
| ATRGLMNLLRSYFRVNNLDVKVKSINGGFTSFLRRKWKFKKERNKGYKHHAEDALIIAN | 94 |
| ADFIFKEWKKLDNAKKVMENQMFEEKRAESMPEIETEQEYKEIFITPHQIKHIKDFKDFK | |
| YSHMVDKKPNRKLINDTLYSTRKDDKGNTLIVNNLNGLYDKDNDKLKKLINKSPEKLLIY | |
| HHDPQTYQKLKLIMEQYGDEKNPLYKYYEETGNYLTKYSKKDNGPVIKKIKYYGNKLNA | |
| HLDITDDYPNSRNKVVKLSLKPYRFDVYLDNGVYKFVTVKNLDVIKKENYYEVNSKCYEE | |
| AKKLKKISNQAEFIASFYNNDLIKINGELYRVIGVNNDLLNRIEVNMIDITYREYLENMND | |
| KRPPQIIKTIASKTQSIKKYSTDILGNLYEVKSKKHPQIIKKG | |
| ATRGLMNLLRSYFRVNNLDVKVKSINGGFTSFLRRKWKFKKERNKGYKHHAEDALIIAN | 95. |
| ADFIFKEWIRLDKAKKVMENQMFEEKQAESMPEIETEQEYKEIFITPHQIKHIKDFKDYK | and |
| YSHRVDKKPNRKLINDTLYSTRKDDKGNTLIVNNLNGLYDKDNDKLKKLINKSPEKLLMY | 966 |
| HHDPQTYQKLKLIMEQYGDEKNPLYKYYEETGNYLTKYSKKDNGPVIKKIKYYGNKLNA | |
| HLDITDDYPNSRNKVVKLSLKPYRFDVYLDNGVYKFVTVKNLDVIKKENYYEVNSKCYEE | |
| AKKLKKISNQAEFIASFYNNDLIKINGELYRVIGVNNDLLNRIEVNMIDITYREYLENMND | |
| KRPPQIIKTIASKTQSIKKYSTDILGNLYEVKSKKHP*IIKKG | |
| ATRGLMNLLRSYFRVNNLDVKVKSINGGFTSFLRRKWKFKKERNKGYKHHAEDALIVAN | 96. |
| ADFIFKEWKKLDKAKKVMENQMFEEKQAESMPEIETEQEYKEIFITPHQIKHIKDFKDYK | and |
| YSHRVDKKPNRELINDTLYSTRKDDKGNTLIVINLNGLYDKDNDKLKKLINKSPEKLLMYH | 966 |
| HDPQTYQKLKLIMEQYGDEKNPLYKYYEETGNYLTKYSKKDNGPVIKKIKYYGNKLNAHL | |
| DITDDYPNSRNKVVKLSLKPYRFDVYLDNGVYKFVTVKNLDVIKKENYYEVNSKCYEEAK | |
| KLKKISNQAEFIASFYNNDLIKINGELYRVIGVNNDLLNRIEVNMIDITYREYLENMNDKR | |
| PPQIIKTIASKTQSIKKYSTDILGNLYEVKSKKHP*IIKKG | |
| ATRGLMNLLRSYFRVNNLDVKVKSINGGFTSFLRRKWKFKKERNKGYKHHAEDALIIAN | 97. |
| ADFIFKEWKKLDKAKKVMENQMFEEKQAESMPEIETEQEYKEIFITPHQIKHIKDFKDYK | and |
| YSHRVDKKPNRKLINDTLYSTRKDDKGNTLIVNNLNGLYDKDNDKLKKLINKSPEKLLMY | 966 |
| HHDPQTYQKLKLIMEQYGDEKNPLYKYYEETGNYLTKYSKKDNGPVIKKIKYYGNKLNA | |
| HLDITDDYPNSRNKVVKLSLKPYRFDVYLDNGVYKFVTVKNLDVIKKENYYEVNSKCYEE | |
| AKKLKKISNQAEFIASFYNNDLIKINGELYRVIGVNNDLLNRIEVNMIDITYREYLENMND | |
| KRPPQIIKTIASKTQSIKKYSTDILGNLYEVKSKKHP*IIKKG | |
| ATRGLMNLLRSYFRVNNLDVKVKSINGGFTSFLRRKWKFKKERNKGYKHHAEDALIIAN | 98. |
| ADFIFKEWKKLDKAKKVMENQMFEEKQAMSMPEIETEQEYKEIFITPHQIKHIKDFKDY | and |
| KYSHRVDKKPNRELINDTLYSTRKDDKGNTLIVNNLNGLYDKDNDKLKKLINKSPEKLLM | 966 |
| YHHDPQTYQKLKLIMEQYGDEKNPLYKYYEETGNYLTKYSKKDNGPVIKKIKYYGNKLNA | |
| HLDITDDYPDSRNKVVKLSLKPYRFDVYLDNGVYKFVTVKNLDVIKKENYYEVNSKCYEE | |
| AKKLKKISNQAEFIASFYNNDLIKINGELYRVIGVNNDLLNRIEVNMIDITYREYLENMND | |
| KRPPHIIKTIASKTQSIKKYSTDILGNLYEVKSQKHPQIIKKG | |
| ATRGLMNLLRSYFRVNNLDVKVKSINGGFTSFLRRKWKFKKERNKGYKHHAEDALIIAN | 99 |
| ADFIFKEWKKLDKAKKVMENQMFEEKQAGSMPEIETEQEYKEIFITPHQIKHIKDFKDYK | |
| YSHRVDKKPNRKLINDTLYSTRKDDKGNTLIVNNLNRLYDKDNDKLKKLINKSPEKLLMY | |
| HHDPQTYQKLKLIMEQYGDEKNPLYKYYEETGNYLTKYSKKDNGPVIKKIKYYGNKLNA | |
| HLDITDDYPNSRNKVVKLSLKPYRFDVYLDNGVYKFVTVKNLDVIKKENYYEVNSKCYEE | |
| AKKLKKISNQAEFIASFYNNDLIKINGELYRVIGVNNDLLNRIEVNMIDITYREYLESMNDK | |
| RPPQIIKTIASKTQTIKKYSTDILGNLYEVKSKKHPQIIKKG | |
| ATRGLMNLLRSYYRVNNLDVKVKSINGGFTSFLRRKWKFKKERNKGYKHHAEDALIIAN | 100 |
| ADFIFKEWKKLDKAKKVMENQMFEEKQAESMPEIETEQEYKEIFITPHQIKHIKDFKDYK | |
| YSHRVDKKPNRELINDTLYSTRKDDKGNTLIVNNLNGLYDKDNDKLKKLTNKSPGKLLM | |
| YHHDPQTYQKLKLIMEQYGDEKNPLYKYYEETGNYLTKYSKKDNGPVIKKIKYYGNKLNA | |
| YLDITDDYPNSRNNVVKLSLKPYRFDVYLDNGVYKFVTVKNLDVIEKENYYEVNSKCYEE | |
| AKKLKKISNQAEFIASFYNNDLIKINGELYRVIGVNNDLLNRIEVNMIDITYREYLENMND | |
| KRPPHIIKTIASKTQSIKKYSTDILGNLYEVKSKKHPQIIKKG | |
| ATRGLMNLLRSYFRVNNLDVKVKSINGGFTSFLRRKWKFKKERNKGYKHHAEDALIIAN | 101 |
| ADFIFKEWKKLDKAKKVMENQMFEEKQAESMPEIETEQEYKEIFITPHQIKHIKDFKDYK | |
| YSHRVDKKPNRKLINDTLYSTRKDDKGNTLIVNNLNGLYDKDNDKFKKLINKSPEKLLMY | |
| HHDPQTYQKLKLIMEQYGDEKNPLYKYYEETGNYLTKYSKKDNGPVIKKIKYYGNKLNA | |
| HLDITDDYPNSRNKVVKLSLKPYRFDVYLDNGVYKFVTVKNLDVIKKDNYYEVNSKCYEE | |
| AKKLKKISNQAEFIASFYNNDLIKINGELYRVIGVNNDLLNRIEVNMIDITYREYLENMND | |
| KRPPQIIKTIATKTQSIKKYSTDILGNLYEVKSKKHPQIIKKG | |
| ATRGLMNLLRTYFRVNNLDVKVKSINGGFTSFLRRKWKFKKERNKGYKHHAEDALIIAN | 102 |
| ADFIFKEWKKLDKAKKVMENQMFEEKHAESMPEIETEQEYKEIFITPHQIKHIKDFKDYK | |
| YSHRVDKKPNRELINDTLYSTRKDDKGNTLIVNNLNGLYDKDNDKLKKLIDKSPEKLLMY | |
| HHDPQTYQKLKLIMEQYGDEKNPLYKYYEETGNYLTKYSKKDNGPVIKKIKYYGNKLNA | |
| HLDITDDYPNSRNKVVKLSLKPYRFDVYLDNGVYKFVTVKNLDVIKKENYYEVNSKCYEE | |
| AKKLKKISNQAEFIASFYNNDLIKINGELYRVIGVNNDLLNRIEVNMIDITYREYLENMND | |
| KRPPQIIKTIASKTQSIKKYSTDILGNLYEVKSKKHPQIIK*G | |
| ATRGLMNLLRSYFRVNNLDVKVKSINGGFTSFLRRKWKFKKERNKGYKHHAEDALIIAN | 103 |
| ADFIFKEWKKLDKAKKVMENQMFEEKQAESMPEIETEQEYNEIFITPHQIKHIKDFKDYK | |
| YSHRVDKKPNRKLINDTLYSTRKDDKGNTLIVNNLNGLYDKDNDKLKKLINKSPEKLLMY | |
| HHDPQTYQKLKLIMEQYGDEKNPLYKYYEETGNYLTKYSKKDNGPVIKKIKYYGNKLNA | |
| HLDITDDYPNSRNKVVKLSLKPYRFDVYLDNGVYKFVTVKNLYVIKKENYYEVNSKCYEE | |
| AKKLKKISNQAEFIASFYNNDLIKINGELYRVIGVNNDLLNRIEVNMIDITYREYLENMND | |
| KRPPQIIKTIASKTQSIKKYSTDILGNLYEVKSKKHPQIIKKG | |
| ATRGLMNLLRSYFRVNNLDVKVKSINGGFTSFLRRKWKFKKERNKGYKHHAEDALIIAN | 104 |
| ADFIFKEWKKLDKAKKVMENQMFEEKQAESMPEIETEQEYKEIFITPHQIKHIKDFKDYK | |
| YSHRVDKKPNRKLINDTLYSTRKDDKGNTLIVNNLNGLYDKDNDKLKKLINKSPEKLLMY | |
| HHDPQTYQKLKLIMEQYGDEKNPLYKYYEETGNYLTKYSKKDNGPVIKKIKYYGNKLNA | |
| HLDITDDYPNSRNKVVKLSLKPYRFDVYLDNGVYKFVTVKNLDVIKKENYYEVNSKCYEE | |
| AKKLKKISNQAEFIASFYNNDLIKINGELYRVIGVNNDLLNRIEVNMIDITYREYLENMND | |
| KRPPQIIKTIASKTQSIKKYSTDILGNLYEVKSKKHPQIIKKG | |

### Methods for Example 3

[0152] The following materials and methods were used in Example 3.

### Plasmids and Oligonucleotides

[0153] Oligonucleotides are listed in Table 11, sgRNA target sites are listed in Table 12, and plasmids used in this study are listed in Table 10.

[0154] Bacterial Cas9/sgRNA expression plasmids were used to express both a human codon optimized version of SaCas9 and the sgRNA, each expressed under a separate T7 promoter. Bacterial expression plasmids used in the selections were derived from BPK2101 (see Examples 1-2) while those used in the site-depletion assay were modified to express a sgRNA with a shortened repeat:anti-repeat sequence (see below). All sgRNAs in these bacterial expression plasmids included two guanines at the 5′ end of the spacer sequence for proper expression from the T7 promoter.

[0155] To generate libraries of SaCas9 variants, amino acids M657-G1053 of SaCas9 were randomly mutagenized using Mutazyme II (Agilent Technologies) at a frequency of ˜5.5 mutations/kilobase. Both wild-type and R1015Q SaCas9 were used as starting template for mutagenesis, resulting in two libraries with estimated complexities of greater than 6×10⁶ clones.

[0156] Positive selection plasmids were assembled by ligating oligonucleotide duplexes encoding target sites into XbaI/SphI-digested p11-lacY-wtx1 (Chen, Z. & Zhao, H. A highly sensitive selection method for directed evolution of homing endonucleases. Nucleic Acids Res 33, e154 (2005)). For the site-depletion experiments, two separate libraries containing different spacer sequences were generated. For each library, an oligonucleotide containing 8 randomized nucleotides adjacent to the spacer sequence (in place of the PAM) was complexed with a bottom strand primer and filled in using Klenow(-exo) (refer to Table 11). The resulting product was digested with EcoRI and ligated into EcoRI/SphI-digested p11-lacY-wtx1. Estimated complexities of the two site-depletion libraries were greater than 4×10⁶ clones.

[0157] For human cell experiments, human codon-optimized wild-type and variant SaCas9s were expressed from a plasmid containing a CAG promoter (Table 12). sgRNA expression plasmids (containing a U6 promoter) were generated by ligating oligonucleotide duplexes encoding the spacer sequence into BsmBI digested VVT1 (See Examples 1-2 or BPK2660 (containing the full length 120 nt crRNA:tracrRNA sgRNA or a 84 nt shortened repeat:anti-repeat version, respectively). All sgRNAs used in this study for human expression included one guanine at the 5′ end of the spacer to ensure proper expression from the U6 promoter, and also used a shortened sgRNA (FIG. 37A-B) similar to that previously described (Ran, F. A. et al. In vivo genome editing using Staphylococcus aureus Cas9. Nature 520, 186-191 (2015)).

### Bioinformatic Analysis of Cas9 Orthologue Sequences

[0158] Similar to alignments performed in previous studies (Fonfara, I. et al. Phylogeny of Cas9 determines functional exchangeability of dual-RNA and Cas9 among orthologous type II CRISPR-Cas systems. Nucleic Acids Res 42, 2577-2590 (2014); Ran, F. A. et al. In vivo genome editing using Staphylococcus aureus Cas9. Nature 520, 186-191 (2015); Anders, C., Niewoehner, O., Duerst, A. & Jinek, M. Structural basis of PAM-dependent target DNA recognition by the Cas9 endonuclease. Nature 513, 569-573 (2014)), Cas9 orthologues similar to both SpCas9 and SaCas9 were aligned using ClustalW2 (ebi.ac.uk/Tools/msa/clustalw2/). The resulting phylogenetic tree and protein alignment were visualized using Geneious version 8.1.6 and ESPript (espript.ibcp.fr/ESPript/ESPript/).

### Bacterial-Based Positive Selection Assay

[0159] The bacterial positive selection assays were performed as previously described (See Examples 1-2). Briefly, Cas9/sgRNA plasmids were transformed into E. coli BW25141(kDE3) (Kleinstiver et al., Nucleic Acids Res 38, 2411-2427 (2010)) containing a positive selection plasmid. Transformations were plated on both non-selective (chloramphenicol) and selective (chloramphenicol+10 mM arabinose) conditions. Cas9 cleavage of the selection plasmid was estimated by calculating the percent survival: (# of colonies on selective plates/ # of colonies on non-selective plates)×100. To select for SaCas9 variants capable of recognizing alternative PAMs, the wild-type and R1015Q libraries with mutagenized PI domains were transformed into competent E. coli BW25141(kDE3) containing positive selection plasmids with NNAAGT (SEQ ID NO:41), NNAGGT (SEQ ID NO:42), NNCAGT (SEQ ID NO:511), NNCGGT (SEQ ID NO:512), NNTAGT (SEQ ID NO:513), or NNTGGT (SEQ ID NO:514) PAMs. Approximately 1×10⁵ clones were screened by plating on selective conditions, and surviving colonies containing SaCas9 variants presumed to cleave the selection plasmid were mini-prepped (MGH DNA Core). All variants were re-screened individually in the positive selection assay, and those with greater than ˜20% survival were sequenced to determine the mutations required for recognition of the alternate PAM.

### Bacterial-Based Site-Depletion Assay

[0160] The site-depletion experiments were performed as previously described (See Examples 1-2). Briefly, the randomized PAM libraries were electroporated into competent E. coli BW25141(λDE3) containing either wild-type, catalytically inactive (D10A/H557A), or KKH variant SaCas9/sgRNA plasmids. Greater than 1×10⁵ colonies were plated on chloramphenicol/carbenicillin plates, and selection plasmids with PAMs resistant to Cas9 targeting contained within the surviving colonies were isolated by maxiprep (Qiagen). The region of the plasmid containing the spacer sequence and PAM was PCR-amplified using the primers listed in Table 11. The KAPA HTP library preparation kit (KAPA BioSystems) was used to generate a dual-indexed Tru-seq Illumina sequencing library using ˜500 ng purified PCR product from each site-depletion condition prior to an Illumina MiSeq high-throughput sequencing run at the Dana-Farber Cancer Institute Molecular Biology Core. The data from the site-depletion experiments was analyzed as previously described (See Examples 1-2), with the exception that the script was modified to analyze 8 randomized nucleotides. Cas9 ability to recognize PAMs was determined by calculating the post-selection PAM depletion value (PPDV) of any given PAM: the ratio of the post-selection frequency of that PAM to the pre-selection library frequency. A control experiment using catalytically inactive SaCas9 was used to establish that a PPDV of 0.794 represents statistically significant depletion relative to the input library.

### Human Cell Culture and Transfection

[0161] U2OS cells obtained from our collaborator T. Cathomen (Freiburg) and U2OS.EGFP cells harboring a single integrated copy of an EGFP-PEST reporter gene (Reyon, D. et al. FLASH assembly of TALENs for high-throughput genome editing. Nat Biotechnol 30, 460-465 (2012)) were cultured in Advanced DMEM medium (Life Technologies) with 10% FBS, penicillin/streptomycin, and 2 mM GlutaMAX (Life Technologies) at 37° C. with 5% CO₂. Cell line identities were validated by STR profiling (ATCC) and deep sequencing, and cells were tested bi-weekly for mycoplasma contamination. U2OS.EGFP culture medium was additionally supplemented with 400 μg/mL G418. Cells were co-transfected with 750 ng Cas9 plasmid and 250 ng sgRNA plasmid using the DN-100 program of a Lonza 4D-nucleofector following the manufacturer's instructions.

### Human Cell EGFP Disruption Assay

[0162] EGFP disruption experiments were performed as previously described (Fu, Y. et al. High-frequency off-target mutagenesis induced by CRISPR-Cas nucleases in human cells. Nat Biotechnol 31, 822-826 (2013); Reyon, D. et al. FLASH assembly of TALENs for high-throughput genome editing. Nat Biotechnol 30, 460-465 (2012)). Approximately 52 hours post-transfection, a Fortessa flow cytometer (BD Biosciences) was used to measure EGFP fluorescence in transfected U2OS.EGFP cells. Negative control transfections of Cas9 and empty U6 promoter plasmids were used to establish background EGFP loss at ˜2.5% for all experiments (represented as a dashed lined in FIGs).

### T7E1 Assay

[0163] T7E1 assays were performed as previously described (Reyon, D. et al. FLASH assembly of TALENs for high-throughput genome editing. Nat Biotechnol 30, 460-465 (2012)) to quantify Cas9-induced mutagenesis at endogenous loci in human cells. Approximately 72 hours post-transfection, genomic DNA was isolated using the Agencourt DNAdvance Genomic DNA Isolation Kit (Beckman Coulter Genomics). Target loci were PCR-amplified from −100 ng of genomic DNA using the primers listed in Table 11. Following an Agencourt Ampure XP clean-up step (Beckman Coulter Genomics), ˜200 ng purified PCR product was denatured and hybridized prior to digestion with T7E1 (New England Biolabs). Following a second clean-up step, mutagenesis frequencies were quantified using a Qiaxcel capillary electrophoresis instrument (Qiagen).

### GUIDE-Seq Experiments

[0164] GUIDE-seq experiments were performed and analyzed as previously described (Tsai, S. Q. et al. GUIDE-seq enables genome-wide profiling of off-target cleavage by CRISPR-Cas nucleases. Nat Biotechnol 33, 187-197 (2015)). Briefly, U2OS cells were transfected as described above with Cas9 and sgRNA plasmids, as well as 100 pmol of a phosphorylated, phosphorothioate-modified double-stranded oligodeoxynucleotide (dsODN) with an embedded NdeI site. Restriction fragment length polymorphism (RFLP) analyses were performed to determine frequency of dsODN-tag integration frequencies ((See Examples 1-2; Tsai, S. Q. et al. GUIDE-seq enables genome-wide profiling of off-target cleavage by CRISPR-Cas nucleases. Nat Biotechnol 33, 187-197 (2015)), and T7E1 assays were performed to quantify on-target Cas9 mutagenesis frequencies. dsODN tag-specific amplification and library preparation (Tsai, S. Q. et al. GUIDE-seq enables genome-wide profiling of off-target cleavage by CRISPR-Cas nucleases. Nat Biotechnol 33, 187-197 (2015)) was performed prior to high-throughput sequencing using an Illumina MiSeq Sequencer. When mapping potential off-target sites, the cut-off for alignment to the on-target spacer sequence was set at 8 mismatches for 21 nucleotide spacers, 9 mismatches for 22 nucleotide spacers, and 10 mismatches for 23 nucleotide spacers. Off-target sites with potential DNA- or RNA-bulges (Lin, Y. et al. CRISPR/Cas9 systems have off-target activity with insertions or deletions between target DNA and guide RNA sequences. Nucleic Acids Res 42, 7473-7485 (2014)) were identified by manual alignment.

TABLE 10
Plasmids used in Example 3

| | SEQ ID | |
|---|---|---|
| Name | NO: | Description |
| BPK2101 | 10 | T7-humanSaCas9-NLS-3xFLAG-T7-Bsalcassette-Sa-sgRNA(120) Addgene ID: 65770 |
| | | T7 promoters at 1-17 and 3418-3434, human codon optimized S. aureus Cas9 at 88- |
| | | 3352, NLS at 3256-3276, 3xFLAG tag at 3283-3348, Bsal sites at 3437-3442 and 3485- |
| | | 3490, gRNA at 3492-3616, T7 terminator at 3627-2674 of SEQ ID NO: 10. |
| MSP2283 | 21 | T7-humanSaCas9-NLS-3xFLAG-T7-site1-Sa-sgRNA(84) |
| | | T7 promoters at nts 1-17 and 3418-3434, human codon optimized S. aureus Cas9 at 88- |
| | | 3351, NLS at 3256-3276, 3xFLAG tag at 3243-33348, site 1 spacer at 3435-3455, |
| | | sgRNA(84) at 3456-3539, T7 terminator at 3562-3609 of SEQ ID NO: 21 |
| MSP2262 | 22 | T7-humanSadCas9(D10A, H557A)-NLS-3xFLAG-T7-site1-Sa-sgRNA(84) |
| | | T7 promoters at nts 1-17 and 3418-3434, human codon optimized S. aureus Cas9 at 88- |
| | | 3351, modified codons at 118-120 and 1759-1761, NLS at 3256-3276, 3xFLAG tag at |
| | | 3243-33348, site 1 spacer at 3435-3455, sgRNA(84) at 3456-3539, T7 terminator at |
| | | 3562-3609 of SEQ ID NO: 22 |
| MSP2253 | 23 | T7-humanSaCas9(E782K, N968K, R1015H)-NLS-3xFLAG-T7-site1-Sa-sgRNA(84) |
| | | T7 promoters at nts 1-17 and 3418-3434, human codon optimized S. aureus Cas9 at 88- |
| | | 3351, modified codons at 2434-2436, 2992-2994, and 3133-3135, NLS at 3256-3276, |
| | | 3xFLAG tag at 3243-33348, site 1 spacer at 3435-3455, sgRNA(84) at 3456-3539, T7 |
| | | terminator at 3562-3609 of SEQ ID NO: 23 |
| MSP2266 | 24 | T7-humanSaCas9-NLS-3xFLAG-T7-site2-Sa-sgRNA(84) |
| | | T7 promoters at 1-17 and 3419-3434, human codon optimized S. aureus Cas9 at 88- |
| | | 3351, NLS at 3256-3276, 3xFLAG tag at 3283-3348, site 2 spacer at 3435-3455, |
| | | sgRNA(84) at 3456-3539, T7 terminator at 3562-3609 of SEQ ID NO: 24 |
| MSP2279 | 25 | T7-humanSadCas9(D10A, H557A)-NLS-3xFLAG-T7-site2-Sa-sgRNA(84) |
| | | T7 promoters at 1-17 and 3419-3434, human codon optimized S. aureus Cas9 at 88- |
| | | 3351, modified codons at 118-120 and 1759-1761, NLS at 3256-3276, 3xFLAG tag at |
| | | 3283-3348, site 2 spacer at 3435-3455, sgRNA(84) at 3456-3539, T7 terminator at |
| | | 3562-3609 of SEQ ID NO: 25 |
| MSP2292 | 26 | T7-humanSaCas9(E782K, N968K, R1015H)-NLS-3xFLAG-T7-site2-Sa-sgRNA(84) |
| | | T7 promoters at 1-17 and 3419-3434, human codon optimized S. aureus Cas9 at 88- |
| | | 3351, modified codons at 2434-2436, 2992-2994, and 3133-3135, NLS at 3256-3276, |
| | | 3xFLAG tag at 3283-3348, site 2 spacer at 3435-3455, sgRNA(84) at 3456-3539, T7 |
| | | terminator at 3562-3609 of SEQ ID NO: 26 |
| p11-lacY- | — | BAD-ccDB-Amp^{R}-AraC-lacY(A177C) (Chen et al, 2005) |
| wtx1 | | |
| BPK2139 | 17 | CAG-humanSaCas9-NLS-3xFLAG Addgene ID: 65776 |
| | | Human codon optimized S. aureus Cas9 1-3195, NLS 3169-3189, 3xFLAG tag 3196- |
| | | 3261 of SEQ ID NO: 17. |
| MSP1830 | 27 | CAG-humanSaCas9(E782K, N968K, R1015H)-NLS-3xFLAG (KKH variant) |
| | | Human codon optimized S. aureus Cas9 1-3264, NLS 3169-3189, modified codons at |
| | | 2347-2349, 2905-2907, and 3046-3048, 3xFLAG tag 3196-3261 of SEQ ID NO: 27 |
| VVT1 | 20 | U6-BsmBlcassette-Sa-sgRNA(120) Addgene ID: 65779 |
| | | U6 promoter 1-318, BsmBI sites at 320-325 and 333-338, S. aureus gRNA 340-466, U6 |
| | | terminator 459-466 of SEQ ID NO: 20. |
| BPK2660 | 28 | U6-BsmBIcassette-Sa-sgRNA(84) |
| | | U6 promoter 1-318, BsmBI sites at 320-325 and 333-338, S. aureus gRNA 340-423, U6 |
| | | terminator 424-430 of SEQ ID NO: 28. |

TABLE 11
Oligonucleotides used in Example 3

| | | |
|---|---|---|
| | | SEQ |
| | | ID |
| Sequence | Description | NO: |

Oligos used to generate positive selection plasmids

| | | |
|---|---|---|
| ctagaGGGGGGGGGGGGGTCGCCCTCG | top oligo to clone site 2 with an NNGAGT (SEQ ID NO: 5) | 515 |
| AACTTCACCTtgGAGTgcatg | PAM into the positive selection vector (XbaI/SphI cut | |
| | p11-lacY-wtx1) | |
| cACTCcaAGGTGAAGTTCGAGGGCGACC | bottom oligo to clone site 2 into the | 516 |
| CCCCgCCCaCCCt | positive selection vector | |

Oligos used to generate libraries for site-depletion experiments

| | | |
|---|---|---|
| GCAGgaattcGGGAGGGGCACGGGCAGCTTGCCG | top strand oligo for site 1 PAM library, | 517 |
| GNNNNNNNNCTNNNGCGCAGGTCACGAGGCATG | cut with EcoRI once filled in | |
| GCAGgaattcGGAGGGTCGCCCTCGAACTTCACC | top strand oligo for site 2 PAM library, | 518 |
| TNNNNNNNNCTNNNGCGCAGGTCACGAGGCATG | cut with EcoRI once filled in | |
| /5Phos/CCTCGTGACCTGCGC | reverse primer to fill in library oligos | 200 |

Primers used to amplify site-depletion libraries for sequencing

| | | |
|---|---|---|
| GATACCGCTCGCCGCAGC | forward primer | 201 |
| CTGCGTTCTGATTTAATCTGTATCAGGC | reverse primer | 202 |

Primers used for T7E1 and RFLP experiments

| | | |
|---|---|---|
| GGAGCAGCTGGTCAGAGGGG | forward primer targeted to EMX1 in U2OS human cells | 209 |
| CCATAGGGAAGGGGGACACTGG | reverse primer targeted to EMX1 in U2OS human cells | 210 |
| GGGCCGGGAAAGAGTTGCTG | forward primer targeted to FANCF in U2OS human cells | 211 |
| GCCCTACATCTGCTCTCCCTCC | reverse primer targeted to FANCF in U2OS human cells | 212 |
| CCAGCACAACTTACTCGCACTTGAC | forward primer targeted to RUNX1 in U2OS human cells | 213 |
| CATCACCAACCCACAGCCAAGG | reverse primer targeted to RUNX1 in U2OS human cells | 214 |
| TCCAGATGGCACATTGTCAG | forward primer targeted to VEGFA in U2OS human cells | 652 |
| AGGGAGCAGGAAAGTGAGGT | reverse primer targeted to VEGFA in U2OS human cells | 653 |

TABLE 12
sgRNA target sites for Example 3

| | | | | | | |
|---|---|---|---|---|---|---|
| | | Spacer | | SEQ | | SEQ |
| | | length | | ID | | ID |
| Prep Name | Name | (nt) | Spacer Sequence | NO:: | Sequence with PAM | NO: |

In VVT1 (120)
EGFP

| | | | | | | |
|---|---|---|---|---|---|---|
| MSP1428 | NNGRRT | 21 | GCCCTCGAACTTCACCTCGGC | 405 | GCCCTCGAACTTCACCTCGGCGCGGGT | 406 |
| | 1 (SEQ ID | | | | | |
| | NO: 46) | | | | | |
| MSP1400 | NNGRRT | 21 | GCAACATCCTGGGGCACAAGC | 397 | GCAACATCCTGGGGCACAAGCTGGAGT | 398 |
| | 2 (SEQ ID | | | | | |
| | NO: 46) | | | | | |
| MSP1401 | NNGRRT | 21 | GTTGTACTCCAGCTTGTGCCC | 519 | GTTGTACTCCAGCTTGTGCCCCAGGAT | 520 |
| | 3 (SEQ ID | | | | | |
| | NO: 46) | | | | | |
| MSP1403 | NNGRRT | 22 | GCAAGGGCGAGGAGCTGTTCAC | 409 | GCAAGGGCGAGGAGCTGTTCACCGGGGT | 410 |
| | 4 (SEQ ID | | | | | |
| | NO: 46) | | | | | |
| MSP1748 | NNARRT | 20 | GGACGGCGACGTAAACGGCC | 521 | GGACGGCGACGTAAACGGCCACAAGT | 522 |
| | 1 (SEQ ID | | | | | |
| | NO: 43) | | | | | |
| MSP1754 | NNARRT | 21 | GAACTTCAGGGTCAGCTTGCC | 523 | GAACTTCAGGGTCAGCTTGCCGTAGGT | 524 |
| | 5 (SEQ ID | | | | | |
| | NO: 43) | | | | | |
| MSP2030 | NNCRRT | 20 | GTCGATGCCCTTCAGCTCGA | 525 | GTCGATGCCCTTCAGCTCGATGCGGT | 526 |
| | 2 (SEQ ID | | | | | |
| | NO: 47) | | | | | |
| MSP2034 | NNCRRT | 22 | GTGACCACCCTGACCTACGGCG | 527 | GTGACCACCCTGACCTACGGCGTGCAGT | 528 |
| | 4 (SEQ ID | | | | | |
| | NO: 47) | | | | | |
| MSP2040 | NNTRRT | 20 | GATATAGACGTTGTGGCTGT | 529 | GATATAGACGTTGTGGCTGTTGTAGT | 530 |
| | 1 (SEQ ID | | | | | |
| | NO: 48) | | | | | |
| MSP2045 | NNTRRT | 21 | GGTGAAGTTCGAGGGCGACAC | 531 | GGTGAAGTTCGAGGGCGACACCCTGGT | 532 |
| | 3 (SEQ ID | | | | | |
| | NO: 48) | | | | | |

In BPK2660
(84)
EGFP

| | | | | | | |
|---|---|---|---|---|---|---|
| MSP2149* | NNARRT | 20 | GGACGGCGACGTAAACGGCC | 521 | GGACGGCGACGTAAACGGCCACAAGT | 522 |
| | 1 (SEQ ID | | | | | |
| | NO: 43) | | | | | |
| MSP2152 | NNARRT | 21 | GTAGTTGCCGTCGTCCTTGAA | 654 | GTAGTTGCCGTCGTCCTTGAAGAAGAT | 655 |
| | 2 (SEQ ID | | | | | |
| | NO: 43) | | | | | |
| MSP2153 | NNARRT | 22 | GCCACCTACGGCAAGCTGACCC | 656 | GCCACCTACGGCAAGCTGACCCTGAAGT | 657 |
| | 3 (SEQ ID | | | | | |
| | NO: 43) | | | | | |
| MSP2154 | NNARRT | 23 | GACGGCAACTACAAGACCCGCGC | 658 | GACGGCAACTACAAGACCCGCGCCGAGGT | 659 |
| | 4 (SEQ ID | | | | | |
| | NO: 43) | | | | | |
| MSP2150* | NNARRT | 21 | GAACTTCAGGGTCAGCTTGCC | 523 | GAACTTCAGGGTCAGCTTGCCGTAGGT | 524 |
| | 5 (SEQ ID | | | | | |
| | NO: 43) | | | | | |
| MSP2155 | NNCRRT | 20 | GCGTGTCCGGCGAGGGCGAG | 305 | GCGTGTCCGGCGAGGGCGAGGGCGAT | 533 |
| | 1 (SEQ ID | | | | | |
| | NO: 47) | | | | | |
| MSP2156* | NNCRRT | 20 | GTCGATGCCCTTCAGCTCGA | 525 | GTCGATGCCCTTCAGCTCGATGCGGT | 526 |
| | 2 (SEQ ID | | | | | |
| | NO: 47) | | | | | |
| MSP2158 | NNCRRT | 22 | GCTCGACCAGGATGGGCACCAC | 534 | GCTCGACCAGGATGGGCACCACCCCGGT | 535 |
| | 3 (SEQ ID | | | | | |
| | NO: 47) | | | | | |
| MSP2159* | NNCRRT | 22 | GTGACCACCCTGACCTACGGCG | 527 | GTGACCACCCTGACCTACGGCGTGCAGT | 528 |
| | 4 (SEQ ID | | | | | |
| | NO: 47) | | | | | |
| MSP2145* | NNGRRT | 21 | GCCCTCGAACTTCACCTCGGC | 405 | GCCCTCGAACTTCACCTCGGCGCGGGT | 406 |
| | 1 (SEQ ID | | | | | |
| | NO: 46) | | | | | |
| MSP2146* | NNGRRT | 21 | GCAACATCCTGGGGCACAAGC | 397 | GCAACATCCTGGGGCACAAGCTGGAGT | 398 |
| | 2 (SEQ ID | | | | | |
| | NO: 46) | | | | | |
| MSP2147 | NNGRRT | 21 | GTTGTACTCCAGCTTGTGCCC | 519 | GTTGTACTCCAGCTTGTGCCCCAGGAT | 520 |
| | 3 (SEQ ID | | | | | |
| | NO: 46) | | | | | |
| MSP2148 | NNGRRT | 22 | GCAAGGGCGAGGAGCTGTTCAC | 409 | GCAAGGGCGAGGAGCTGTTCACCGGGGT | 410 |
| | 4 (SEQ ID | | | | | |
| | NO: 46) | | | | | |
| MSP2161* | NNTRRT | 20 | GATATAGACGTTGTGGCTGT | 529 | GATATAGACGTTGTGGCTGTTGTAGT | 530 |
| | 1 (SEQ ID | | | | | |
| | NO: 48) | | | | | |
| MSP2162 | NNTRRT | 21 | GGGCGAGGAGCTGTTCACCGG | 536 | GGGCGAGGAGCTGTTCACCGGGGTGGT | 537 |
| | 2 (SEQ ID | | | | | |
| | NO: 48) | | | | | |
| MSP2164* | NNTRRT | 21 | GGTGAAGTTCGAGGGCGACAC | 531 | GGTGAAGTTCGAGGGCGACACCCTGGT | 532 |
| | 3 (SEQ ID | | | | | |
| | NO: 48) | | | | | |
| MSP2163 | NNTRRT | 21 | GCACTGCACGCCGTAGGTCAG | 538 | GCACTGCACGCCGTAGGTCAGGGTGGT | 539 |
| | 4 (SEQ ID | | | | | |
| | NO: 48) | | | | | |

Endogenous
genes
EMX1

| | | | | | | |
|---|---|---|---|---|---|---|
| MSP2184** | EMX11 | 22 | GTGTGGTTCCAGAACCGGAGGA | 540 | GTGTGGTTCCAGAACCGGAGGACAAAGT | 541 |
| MSP2185 | EMX12 | 21 | GCAGGCTCTCCGAGGAGAAGG | 542 | GCAGGCTCTCCGAGGAGAAGGCCAAGT | 543 |
| MSP2183 | EMX13 | 23 | GCCCCTCCCTCCCTGGCCCAGGT | 544. | GCCCCTCCCTCCCTGGCCCAGGTGAAGGT | 545. |
| MSP2199** | EMX1 4 | 21 | GCTCAGCCTGAGTGTTGAGGC | 546. | GCTCAGCCTGAGTGTTGAGGCCCCAGT | 547. |
| MSP2202 | EMX15 | 21 | GCCTGCTTCGTGGCAATGCGCC | 548. | GCCTGCTTCGTGGCAATGCGCCACCGGT | 549. |
| MSP2168** | EMX16 | 21 | GCAACCACAAACCCACGAGGG | 550. | GCAACCACAAACCCACGAGGGCAGAGT | 551. |
| MSP2169 | EMX17 | 21 | GGCCTCCCCAAAGCCTGGCCA | 552. | GGCCTCCCCAAAGCCTGGCCAGGGAGT | 553. |
| MSP2170 | EMX18 | 23 | GCAGAAGCTGGAGGAGGAAGGGC | 554. | GCAGAAGCTGGAGGAGGAAGGGCCTGAGT | 555. |
| MSP2201 | EMX19 | 21 | GCTTCGTGGCAATGCGCCACCG | 556. | GCTTCGTGGCAATGCGCCACCGGTTGAT | 557. |
| MSP2200** | EMX110 | 22 | GGCTCTCCGAGGAGAAGGCCA | 558. | GGCTCTCCGAGGAGAAGGCCAAGTGGT | 559. |

FANCF

| | | | | | | |
|---|---|---|---|---|---|---|
| MSP2189 | FANCF 1 | 22 | GCCTCTCTGCAATGCTATTGGT | 560. | GCCTCTCTGCAATGCTATTGGTCGAAAT | 561. |
| MSP2190 | FANCF 2 | 21 | GCGTACTGATTGGAACATCCG | 562. | GCGTACTGATTGGAACATCCGCGAAAT | 563. |
| MSP2186 | FANCF 3 | 23 | GACGTCACAGTGACCGAGGGCCT | 564. | GACGTCACAGTGACCGAGGGCCTGGAAGT | 565. |
| MSP2187 | FANCF 4 | 23 | GCCCGGCGCACGGTGGCGGGGTC | 566. | GCCCGGCGCACGGTGGCGGGGTCCCAGGT | 567. |
| MSP2188 | FANCF 5 | 21 | GGCGGGGTCCCAGGTGCTGAC | 568. | GGCGGGGTCCCAGGTGCTGACGTAGGT | 569. |
| MSP2205 | FANCF 6 | 21 | GGCGTATCATTTCGCGGATGT | 570. | GGCGTATCATTTCGCGGATGTTCCAAT | 571. |
| MSP2208 | FANCF 7 | 22 | GAGACCGCCAGAAGCTCGGAAA | 572. | GAGACCGCCAGAAGCTCGGAAAAGCGAT | 573. |
| MSP2204 | FANCF 8 | 21 | GGATCGCTTTTCCGAGCTTCT | 574. | GGATCGCTTTTCCGAGCTTCTGGCGGT | 575. |
| MSP2207** | FANCF 9 | 22 | GCGCCCACTGCAAGGCCCGGCG | 576. | GCGCCCACTGCAAGGCCCGGCGCACGGT | 577. |
| MSP2172** | FANCF 10 | 21 | GTAGGGCCTTCGCGCACCTCA | 578. | GTAGGGCCTTCGCGCACCTCATGGAAT | 579. |
| MSP2174 | FANCF 11 | 22 | GCAGCCGCCGCTCCAGAGCCGT | 580. | GCAGCCGCCGCTCCAGAGCCGTGCGAAT | 581. |
| MSP2332 | FANCF 12 | 22 | GGCCATGCCGACCAAAGCGCCG | 582. | GGCCATGCCGACCAAAGCGCCGATGGAT | 583. |
| MSP2171** | FANCF 13 | 21 | GCAAGGCCCGGCGCACGGTGG | 584. | GCAAGGCCCGGCGCACGGTGGCGGGGT | 585. |
| MSP2173 | FANCF 14 | 22 | GAGGCAAGAGGGCGGCTTTGGG | 586. | GAGGCAAGAGGGCGGCTTTGGGCGGGGT | 587. |
| MSP2206 | FANCF 15 | 22 | GTGACCGAGGGCCTGGAAGTTC | 588. | GTGACCGAGGGCCTGGAAGTTCGCTAAT | 589. |
| MSP2203** | FANCF 16 | 21 | GGGGTCCCAGGTGCTGACGTA | 590. | GGGGTCCCAGGTGCTGACGTAGGTAGT | 591. |
| MSP2209 | FANCF 17 | 22 | GTACTGATTGGAACATCCGCGA | 592. | GTACTGATTGGAACATCCGCGAAATGAT | 593. |

RUNX1

| | | | | | | |
|---|---|---|---|---|---|---|
| MSP2192 | RUNX11 | 23 | GTCTGAAGCCATCGCTTCCTCCT | 594. | GTCTGAAGCCATCGCTTCCTCCTGAAAAT | 595. |
| MSP2193 | RUNX12 | 21 | GGTTTTCGCTCCGAAGGTAAA | 596. | GGTTTTCGCTCCGAAGGTAAAAGAAAT | 597. |
| MSP2195 | RUNX13 | 21 | GGGACTCCCCAAGCCCTATTA | 598. | GGGACTCCCCAAGCCCTATTAAAAAAT | 599. |
| MSP2235 | RUNX14 | 22 | GCAGCTTGTTTCACCTCGGTGC | 600. | GCAGCTTGTTTCACCTCGGTGCAGAGAT | 601. |
| MSP2194 | RUNX15 | 22 | GACCTGTCTTGGTTTTCGCTCC | 602. | GACCTGTCTTGGTTTTCGCTCCGAAGGT | 603. |
| MSP2216 | RUNX16 | 23 | GCTTCCATCTGATTAGTAAGTAA | 604. | GCTTCCATCTGATTAGTAAGTAATCCAAT | 605. |
| MSP2214 | RUNX17 | 22 | GTGCAGAGATGCCTCGGTGCCT | 606. | GTGCAGAGATGCCTCGGTGCCTGCCAGT | 607. |
| MSP2211 | RUNX18 | 21 | GAGGGTGCATTTTCAGGAGGA | 608. | GAGGGTGCATTTTCAGGAGGAAGCGAT | 609. |
| MSP2217 | RUNX19 | 23 | GTTTCACCTCGGTGCAGAGATGC | 610. | GTTTCACCTCGGTGCAGAGATGCCTCGGT | 611. |
| MSP2176 | RUNX1 | 22 | GCGATGGCTTCAGACAGCATAT | 612. | GCGATGGCTTCAGACAGCATATTTGAGT | 613. |
| | 10 | | | | | |
| MSP2177 | RUNX1 | 22 | GCTCCGAAGGTAAAAGAAATCA | 614. | GCTCCGAAGGTAAAAGAAATCATTGAGT | 615. |
| | 11 | | | | | |
| MSP2334 | RUNX1 | 22 | GAGGCATATGATTACAAGTCTA | 616. | GAGGCATATGATTACAAGTCTATTGGAT | 617. |
| | 12 | | | | | |
| MSP2175** | RUNX1 | 21 | GAAAGAGAGATGTAGGGCTAG | 618. | GAAAGAGAGATGTAGGGCTAGAGGGGT | 619. |
| | 13 | | | | | |
| MSP2178** | RUNX1 | 23 | GTACTCACCTCTCATGAAGCACT | 620. | GTACTCACCTCTCATGAAGCACTGTGGGT | 621. |
| | 14 | | | | | |
| MSP2210 | RUNX1 | 21 | GAGGTGAGTACATGCTGGTCT | 622. | GAGGTGAGTACATGCTGGTCTTGTAAT | 623. |
| | 15 | | | | | |
| MSP2213 | RUNX1 | 22 | GAGAGGAATTCAAACTGAGGCA | 624. | GAGAGGAATTCAAACTGAGGCATATGAT | 625. |
| | 16 | | | | | |
| MSP2212 | RUNX1 | 21 | GAGGCTGAAACAGTGACCTGT | 626. | GAGGCTGAAACAGTGACCTGTCTTGGT | 627. |
| | 17 | | | | | |

VEGFA

| | | | | | | |
|---|---|---|---|---|---|---|
| MSP2196 | VEGFA 1 | 21 | GTACATGAAGCAACTCCAGTC | 628. | GTACATGAAGCAACTCCAGTCCCAAAT | 629. |
| MSP2198 | VEGFA 2 | 21 | GACGGGTGGGGAGAGGGACAC | 630. | GACGGGTGGGGAGAGGGACACACAGAT | 631. |
| MSP2197 | VEGFA 3 | 22 | GTCCCAAATATGTAGCTGTTTG | 632. | GTCCCAAATATGTAGCTGTTTGGGAGGT | 633. |
| MSP2219 | VEGFA 4 | 21 | GGCCAGGGGTCACTCCAGGAT | 634. | GGCCAGGGGTCACTCCAGGATTCCAAT | 635. |
| MSP2220 | VEGFA 5 | 22 | GCCAGAGCCGGGGTGTGCAGAC | 636. | GCCAGAGCCGGGGTGTGCAGACGGCAGT | 637. |
| MSP2181 | VEGFA 6 | 22 | GAGGACGTGTGTGTCTGTGTGG | 638. | GAGGACGTGTGTGTCTGTGTGGGTGAGT | 639. |
| MSP2336 | VEGFA 7 | 22 | GGGAGAAGGCCAGGGGTCACTC | 640. | GGGAGAAGGCCAGGGGTCACTCCAGGAT | 641. |
| MSP2179** | VEGFA 8 | 21 | GGGTGAGTGAGTGTGTGCGTG | 642. | GGGTGAGTGAGTGTGTGCGTGTGGGGT | 643. |
| MSP2180 | VEGFA 9 | 22 | GAGTGAGGACGTGTGTGTCTGT | 644. | GAGTGAGGACGTGTGTGTCTGTGTGGGT | 645. |
| MSP2182 | VEGFA | 22 | GCGTTGGAGCGGGGAGAAGGCC | 646. | GCGTTGGAGCGGGGAGAAGGCCAGGGGT | 647. |
| | 10 | | | | | |
| MSP2218 | VEGFA | 21 | GCTCCATTCACCCAGCTTCCC | 648. | GCTCCATTCACCCAGCTTCCCTGTGGT | 649. |
| | 11 | | | | | |

*Used in FIGS. 1C and 1E, FIG. 32
**Used for GUIDE-seq experiments in FIG. 3, FIGS. 36A-B

### Example 3. Engineering the PAM Specificity of Staphylococcus aureus Cas9

[0165] Site-specific DNA cleavage by CRISPR-Cas9 nucleases is primarily guided by RNA-DNA interactions, but also requires Cas9-mediated recognition of a protospacer adjacent motif (PAM). Although the commonly used Streptococcus pyogenes Cas9 specifies only two nucleotides within its NGG PAM, other Cas9 orthologues with desirable properties recognize longer PAMs. While potentially advantageous from the perspective of specificity, extended PAM sequences can limit the targeting range of Cas9 orthologues for genome editing applications. One possible strategy to broaden the range of sequences targetable by such Cas9 orthologues might be to evolve variants with relaxed specificity for certain positions within the PAM. Here we used molecular evolution to modify the NNGRRT (SEQ ID NO:46) PAM specificity of Staphylococcus aureus Cas9 (SaCas9), a smaller size orthologue that is useful for applications requiring viral delivery. One variant we identified, referred to as KKH SaCas9, shows robust genome editing activities at endogenous human target sites with NNNRRT PAMs. Importantly, using the GUIDE-seq method, we showed that both wild-type and KKH SaCas9 induce comparable numbers of off-target effects in human cells. KKH SaCas9 increased the targeting range of SaCas9 by nearly two-to four-fold, enabling targeting of sequences that cannot be altered with the wild-type nuclease. More generally, these results demonstrate the feasibility of relaxing PAM specificity to broaden the targeting range of Cas9 orthologues. Our molecular evolution strategy does not require structural information or a priori knowledge of specific residues that contact the PAM, and therefore should be applicable to a wide range of Cas9 orthologues.

### Results

[0166] We devised an unbiased genetic approach for engineering Cas9 variants with relaxed PAM recognition specificities that does not require structural information. We tested this strategy using SaCas9, for which no structural data was available at the time we initiated these studies. In an initial step, we sought to conservatively estimate the PAM-interacting domain for SaCas9 by sequence comparisons with the structurally well-characterized SpCas9 (Jiang et al., Science 348, 1477-1481 (2015); Anders et al., Nature 513, 569-573 (2014); Jinek et al., Science (2014); Nishimasu et al., Cell (2014)). Although SpCas9 and SaCas9 differ substantially at the primary sequence level (FIG. 21A, FIG. 29), alignment of both with 10 additional orthologues enabled us to conservatively define a predicted PAM-interacting domain for SaCas9 (See Methods for Example 3; FIGS. 29 and 30).

[0167] Because the guanine at the third position in the SaCas9 PAM is the most strictly specified base (Ran et al., Nature 520, 186-191 (2015)), we randomly mutagenized the predicted PI domain and used our previously described bacterial cell-based method (see Examples 1-2) to attempt to select for mutants capable of cleaving sites with each of the three other possible nucleotides at the 3^{rd} PAM position (i.e., NN[A/C/T]RRT PAMs (NNHRRT (SEQ ID NO:44)); FIG. 31A). All but one of the surviving variants from the selections against sites containing NNARRT (SEQ ID NO:43) and NNCRRT (SEQ ID NO:47) PAMs harbored an R1015H mutation, whereas we did not obtain any variants from the selections with NNTRRT (SEQ ID NO:48) PAMs. These results strongly suggested that R1015 might participate in recognition of the guanine at the third position of the SpCas9 PAM. Indeed, in our alignments we found that R1015 of SaCas9 is in the vicinity of SpCas9 R1335 (FIG. 30), a residue previously implicated in recognition of the third base position of the PAM ((See Examples 1-2; Anders, C., Niewoehner, O., Duerst, A. & Jinek, M. Structural basis of PAM-dependent target DNA recognition by the Cas9 endonuclease. Nature 513, 569-573 (2014)). Consistent with this, we found that mutation of R1015 to an alanine or glutamine substantially decreased SaCas9 activity on a target site containing an NNGRRT (SEQ ID NO:46) PAM (FIG. 21B) when tested in our bacterial selection system (FIG. 31B). Alanine or glutamine substitutions of other positively charged residues in the vicinity of R1015 did not have as strong of an effect on SaCas9 activity (FIG. 21B, FIG. 30).

[0168] Our bacterial-based selection results also suggested that the R1015H mutation might at least partially relax the specificity of SaCas9 at the third position of the PAM. However, we found that the R1015H single mutant had suboptimal activity in our previously described human cell-based EGFP disruption assay (Fu et al., Nat Biotechnol 31, 822-826 (2013); Reyon et al., Nat Biotechnol 30, 460-465 (2012)) when tested against sites with any nucleotide at the 3^{rd} position of NNNRRT PAMs (FIG. 21C). Because this suggested that additional mutations might be required to increase or optimize the activity of the R1015H mutant in human cells, we randomly mutagenized a region encompassing the predicted PI domain of an SaCas9 that also harbored a R1015Q mutation. We then selected for variants from this library that could cleave target sites with each of the three different NNHRRT (SEQ ID NO:44) PAMs using our bacterial selection system. We used R1015Q because, unlike R1015H, this mutant did not show activity in bacteria (FIG. 21B). Although no surviving clones were again observed when selecting against NNTRRT (SEQ ID NO:48) PAMs, selections with the R1015Q variant against NNARRT (SEQ ID NO:43) or NNCRRT (SEQ ID NO:47) yielded mutations at E782, K929, N968, and, surprisingly, mutation of the Q at 1015 to H.

[0169] Combined with the selection results from wild-type SaCas9, the most frequent missense mutations identified across all selections were E782K, K929R, N968K, and R1O15H (FIG. 21D), suggesting that a combination of these mutations might permit efficient cleavage of sites that contain an A or C at the third position of the SaCas9 PAM. We therefore tested SaCas9 variants containing different combinations of these mutations using the human cell-based EGFP disruption assay with sgRNAs targeted to sites harboring each of the 4 bases at the third position of the PAM (i.e., on NNNRRT PAMs) (FIG. 21E, FIG. 32). We found that the variants with the triple mutant combinations E782K/N968K/R1015H and E782K/K929R/R1015H were highly active at sites with NNNRRT PAMs (FIG. 21E, FIG. 32), whereas the quadruple mutant variant containing all four mutations (E782K/K929R/N968K/R1015H) had generally lower activities on these sites (FIG. 32). We chose the E782K/N968K/R1015H (hereafter referred to as the KKH variant) for further characterization, and verified using our human cell-based EGFP disruption assay that all three substitutions comprising the KKH variant were required for activity (FIG. 21E).

[0170] To more comprehensively define the PAM specificities of KKH and wild-type SaCas9, we used our previously described bacterial cell-based site-depletion assay (See Examples 1-2) (FIG. 33). This method yields Cas9 PAM specificity profiles by identifying the relative cleavage (and therefore depletion in bacterial cells) of DNA plasmids bearing randomized PAM sequences, quantified as a post-selection PAM depletion value (PPDV). We performed site-depletion experiments with both wild-type and KKH SaCas9 using libraries with two different spacer sequences each with 8 randomized bases in place of the PAM (FIG. 33). Control experiments using catalytically inactive SaCas9 showed little depletion of any PAM sequence (FIG. 34A), enabling us to establish a threshold for statistically significant depletion as a PPDV of 0.794 (FIG. 34B). Previous experiments have shown that PAMs with PPDVs of <0.2 in our bacterial site-depletion assay can be efficiently cleaved in our human cell-based EGFP disruption assay (See Examples 1-2). With wild-type SaCas9, the most depleted PAMs (based on mean PPDVs obtained from the two libraries) were, as expected, the four NNGRRT (SEQ ID NO:46) (PAMs (FIG. 21F and FIG. 34C). Interestingly, other PAMs with mean PPDVs <0.1 included those of the form NNGRRN (SEQ ID NO:49) (FIG. 34), suggesting that for some spacer sequences the last position of the PAM may not be fully specified as a T in our bacterial-based assay (although a previous report demonstrated by an in vitro PAM depletion assay, ChIP-seq, and targeting of endogenous human sites that a thymine at the sixth position of the PAM was highly preferred (Ran, F. A. et al. In vivo genome editing using Staphylococcus aureus Cas9. Nature 520, 186-191 (2015))). By contrast, with the KKH variant, PAMs with mean PPDVs of <0.2 included not only the NNGRRT (SEQ ID NO:46) PAMs but also all four NNARRT (SEQ ID NO:43), all four NNCRRT (SEQ ID NO:47), and three of the four NNTRRT (SEQ ID NO:48) PAMs (FIG. 21F, FIGS. 34C and 34E). These results suggested that KKH SaCas9 appears to have a broadened PAM targeting range relative to its wild-type counterpart.

[0171] To assess the robustness of the KKH SaCas9 variant in human cells, we tested its activity on 55 different endogenous gene target sites containing a variety of NNNRRT PAMs (FIG. 22A). The KKH variant showed efficient activity with a mean mutagenesis frequency of 24.7% across all sites, with 80% of sites (44 of 55 sites) showing greater than 5% disruption. Analysis of KKH SaCas9 activity across all 55 sites revealed ordered preferences for the 3^{rd} position of the PAM (NN[G>A=C>T]RRT; FIG. 22B) as well as the 4^{th}/5^{th} positions of the PAM (NNN[AG>GG>GA>AA]T; FIG. 22C). Consistent with this, we observed differences among the 16 possible combinations of the 3^{rd}/4^{th}/5^{th} positions of an NNNRRT PAM (FIG. 35A). KKH SaCas9 functioned efficiently on spacer lengths ranging from 21-23 nucleotides (FIG. 22D), spacer sequences with variable GC content (FIG. 35B), and PAMs with variable GC content (FIG. 35C). Sequence logos derived from sites cleaved with low, medium, and high efficiencies (0-10%, 10-30%, and >30% mean mutagenesis frequencies, respectively) revealed little sequence preference across the entire target site other than at the 4^{th} and 5^{th} positions of the NNNRRT PAM, and perhaps a slight preference for guanine at the 2^{nd} PAM position on sites cleaved with high efficiencies (FIG. 35D).

[0172] To demonstrate that the KKH variant enables modification of PAMs that cannot be targeted by wild-type SaCas9, we performed direct comparisons of these nucleases in human cells on sites bearing various NNNRRT PAMs. Assessment of 16 sites using our EGFP disruption assay and 16 endogenous human gene targets (FIGS. 22E and 22F, respectively) showed that KKH SaCas9 robustly modified target sites bearing NNNRRT PAMs whereas wild-type SaCas9 efficiently targeted only sites with NNGRRT (SEQ ID NO:46) PAMs. For all 24 sites with NNHRRT (SEQ ID NO:44) PAMs, the KKH variant induced substantially higher rates of mutagenesis than wild-type SaCas9; on the eight sites with NNGRRT (SEQ ID NO:46) PAMs, KKH SaCas9 induced comparable or slightly lower levels of mutagenesis compared with wild-type (FIGS. 22E and 22F). These results collectively demonstrate that the KKH variant can cleave sites with NNNRRT PAMs, thereby enabling targeting of sites with NNHRRT (SEQ ID NO:44) PAMs that currently cannot be efficiently altered by wild-type SaCas9 in human cells.

[0173] To assess the impact of the KKH mutations on the genome-wide specificity of SaCas9, we used the GUIDE-seq (Genome-wide Unbiased Identification of DSBs Enabled by sequencing) method (Tsai, S. Q. et al. GUIDE-seq enables genome-wide profiling of off-target cleavage by CRISPR-Cas nucleases. Nat Biotechnol 33, 187-197 (2015)) to directly compare the off-target profiles of wild-type and KKH SaCas9 with the same sgRNAs. When tested with sgRNAs targeted to six endogenous human gene sites containing NNGRRT (SEQ ID NO:46) PAMs, we observed that wild-type and KKH SaCas9 induced nearly identical GUIDE-seq tag integration rates and on-target cleavage frequencies for all six sites (FIGS. 36A and 36B, respectively). Furthermore, wild-type and KKH SaCas9 induce mutations at similar numbers of off-target sites with each of the six sgRNAs (FIGS. 23A and 23B). Off-target sites for the KKH variant generally adhered to the NNNRRT PAM motif, and off-target sites for wild-type SaCas9 adhered to an NNGRR[T>G] motif (FIG. 22B). With one of the sgRNAs, which induced the highest number of off-target sites among the six sgRNAs tested, we observed a similar number of off-target sites with wild-type and KKH SaCas9. However, the off-target sites were only partially overlapping between wild-type and KKH SaCas9, as might be expected given their different PAM specificities (FIGS. 23B and 23C). Although we would not advocate the use of the KKH variant for targeting sites with NNGRRT (SEQ ID NO:46) PAMs (because wild-type SaCas9 can show higher on-target activities than KKH for these sites), these results suggest that KKH SaCas9 only cleaves off-target sites with the expected PAMs and generally induces numbers of off-target sites comparable to those observed with wild-type SaCas9.

[0174] To further examine the genome-wide specificity of KKH SaCas9, we tested five additional sgRNAs targeted to sites containing NNHRRT (SEQ ID NO:44) PAMs (FIGS. 23D and 23E). Off-target sites detected by GUIDE-seq were generally low in number (comparable to the numbers observed with wild-type SpCas9 and SpCas9 variants in previously published experiments (See Examples 1-2 (Tsai, S. Q. et al. GUIDE-seq enables genome-wide profiling of off-target cleavage by CRISPR-Cas nucleases. Nat Biotechnol 33, 187-197 (2015)), displayed potential DNA- and RNA-bulged off-targets (Lin, Y. et al. CRISPR/Cas9 systems have off-target activity with insertions or deletions between target DNA and guide RNA sequences. Nucleic Acids Res 42, 7473-7485 (2014)), and contained expected PAM sequences. Taken together, our experiments demonstrate that the genome-wide specificities of wild-type and KKH SaCas9 are similar and generally show low numbers of off-target mutations in human cells as judged by GUIDE-seq.

[0175] Although wild-type SaCas9 remains the most optimal choice for targeting NNGRRT (SEQ ID NO:46) PAMs, the KKH SaCas9 variant we describe here can robustly target sites with NNARRT (SEQ ID NO:43) and NNCRRT (SEQ ID NO:47) PAMs and has a reasonable success rate for sites with NNTRRT (SEQ ID NO:48) PAMs. Thus, we conservatively estimate that the KKH variant increases the targeting range of SaCas9 by nearly two- to four-fold in random DNA sequence, thereby improving the prospects for more broadly utilizing SaCas9 in a variety of different applications that require highly precise targeting. Using GUIDE-seq, we demonstrated that KKH SaCas9 induces similar numbers of off-target mutations as wild-type SaCas9 when targeted to the same sites that contain NNGRRT (SEQ ID NO:46) PAMs. Also, KKH SaCas9 induces only a small number of off-target mutations when targeted to sites bearing NNHRRT (SEQ ID NO:44) PAMs. Although KKH SaCas9 recognizes a modified PAM sequence relative to wild-type SaCas9, our findings are not entirely surprising given that the total combined length of the protospacer and PAM is still long enough with the KKH variant (24 to 26 bps) to be reasonably orthogonal to the human genome. Furthermore, it is possible that modifying PAM recognition can improve specificity by altering the energetics of Cas9/sgRNA interaction with its target site (similar to the previously proposed mechanisms for improved specificities of truncated sgRNAs (Fu, Y., Sander, J.D., Reyon, D., Cascio, V.M. & Joung, J.K. Improving CRISPR-Cas nuclease specificity using truncated guide RNAs. Nat Biotechnol 32, 279-284 (2014)) or the D1135E SpCas9 mutant (See Examples 1-2)).

### Example 4. Improving the Activity of the SpCas9-VQR Variant

[0176] Because the SpCas9-VQR variant has a preference for NGAN PAMs of: NGAG>NGAA=NGAT>NGAC, we sought to select for derivative variants that had improved activity against NGAH PAMs (where H=A, C, or T). Selections with the R1335Q library (with PI domain randomly mutagenized) against cells that contain target sites with either an NGAA, NGAT, or NGAC PAM enabled us to sequence additional clones that contained mutations that convey an altered PAM specificity. The sequences of these clones revealed additional mutations that might be important for altering PAM specificity towards NGAA, NGAT, or NGAC PAMs.

[0177] Based on the results of these selections, the VQR variant and 24 other derivative variants were tested against NGAG, NGAA, NGAT, and NGAC PAM sites in bacteria. A number of these derivative variants survived better than the VQR variant on NGAH PAM sites, most of which contained the G1218R mutation (Table 7 and FIG. 24).

TABLE 7
Table of variants and their corresponding amino acid changes.

| | variant | D1135 | G1218 | E1219 | R1335 | T1337 |
|---|---|---|---|---|---|---|
| A1 | VRQ | V | R | — | Q | — |
| A2 | NRQ | N | R | — | Q | — |
| A3 | YRQ | Y | R | — | Q | — |
| A4 | VRQL | V | R | — | Q | L |
| A5 | VRQM | V | R | — | Q | M |
| A6 | VRQR | V | R | — | Q | R |
| A7 | VRQE | V | R | — | Q | E |
| A8 | VRQQ | V | R | — | Q | Q |
| A9 | NRQL | N | R | — | Q | L |
| A10 | NRQM | N | R | — | Q | M |
| A11 | NRQR | N | R | — | Q | R |
| A12 | NRQE | N | R | — | Q | E |
| B1 | NRQQ | N | R | — | Q | Q |
| B2 | YRQL | Y | R | — | Q | L |
| B3 | YRQM | Y | R | — | Q | M |
| B4 | YRQR | Y | R | — | Q | R |
| B5 | YRQE | Y | R | — | Q | E |
| B6 | YRQQ | Y | R | — | Q | Q |
| B7 | VRVQE | V | R | V | Q | E |
| B8 | NRVQE | N | R | V | Q | E |
| B9 | YRVQE | Y | R | V | Q | E |
| B10 | VVQE | V | — | V | Q | E |
| B11 | NVQE | N | — | V | Q | E |
| B12 | YVQE | Y | — | V | Q | E |
| C1 | VQR | V | — | — | Q | R |

[0178] Given that the results from the bacterial screen demonstrated that some of these additional mutations improved activity against NGAH PAM sites, we tested some of the best candidates in human cells in the EGFP disruption assay. What we observed is that a number of these variants outperformed the VQR variant at targeting NGAH sites, including the VRQR, NRQR, and YRQR variants (Table 8 and FIG. 25). The main difference between these clones and the VQR variant is that they include a G1218R mutation.

TABLE 8
Table of SpCas9-VQR derivatives and their
corresponding amino acid changes

| variant | D1135 | G1218 | R1335 | T1337 |
|---|---|---|---|---|
| VQR | V | — | Q | R |
| YRQ | Y | R | Q | — |
| VRQR | V | R | Q | R |
| VRQQ | V | R | Q | Q |
| NRQR | N | R | Q | R |
| NRQQ | N | R | Q | Q |
| YROR | Y | R | Q | R |
| YRQQ | Y | R | Q | Q |

[0179] Because the VRQR variant appeared to be the most robust of those tested, we compared its activity to that of the VQR against 9 different endogenous sites in human cells (2 sites for each NGAA, NGAC, NGAT, and NGAG PAMs, and 1 site for an NGCG PAM). This data reveals that the VRQR variant outperforms the VQR variant at all sites tested in human cells (FIG. 26).

[0180] After demonstrating that VRQR variant has improved activity relative to the VQR variant, we sought to determine whether adding additional substitutions could further improve activity. Because we observed additional mutations in the selections that were in close proximity to the PAM interacting pocket of SpCas9, a subset of these mutations were added to the VQR and VRQR variants and screened in bacteria against sites containing NGAG, NGAA, NGAT, and NGAC PAMs (Table 9 and FIG. 27). A number of derivative variants appears to have higher activity against NGAT and NGAC PAM sites, so we proceeded to test these variants in human cells. We tested in the human cell EGFP disruption assay additional variants that contained added mutations to either the VQR or VRQR background. These experiments again revealed that the VRQR has more robust activity against NGAH PAMs than the VQR variant, and that additional mutations to the VRQR backbone are beneficial.

TABLE 9
Table of variants and their corresponding amino acid changes

| | variant | mutations |
|---|---|---|
| 1 | VQR + L1111H | L1111H/D1135V/R1335Q/T1337R |
| 2 | VRQR + L1111H | L1111H/D1135V/G1218R/R1335Q/T1337R |
| 3 | VQR + E1219K | D1135V/E1219K/R1335Q/T1337R |
| 4 | VQR + E1219V | D1135V/E1219V/R1335Q/T1337R |
| 5 | VQR + N1317K | D1135V/N1317K/R1335Q/T1337R |
| 6 | VRQR + N1317K | D1135V/G1218R/N1317K/R1335Q/T1337R |
| 7 | VQR + G1104K | G1104R/D1135V/R1335Q/T1337R |
| 8 | VRQR + G1104K | G1104R/D1135V/G1218R/R1335Q/T1337R |
| 9 | VQR + S1109T | S1109T/D1135V/R1335Q/T1337R |
| 10 | VRQR + S1109T | S1109T/D1135V/G1218R/R1335Q/T1337R |
| 11 | NQR + S1136N | D1135N/S1136N/R1335Q/T1337R |
| 12 | NRQR + S1136N | D1135N/S1136N/G1218R/R1335Q/T1337R |
| 13 | VQR | D1135V/R1335Q/T1337R |
| 14 | VRQR | D1135V/G1218R/R1335Q/T1337R |

[0181] Taken together, these results suggest that including additional mutations in the SpCas9-VQR variant can improve activity against sites that contain NGAN PAMs, specifically sites that contain NGAH PAMs.

### REFERENCES

[0182] 1. Sander, J.D. & Joung, J.K. CRISPR-Cas systems for editing, regulating and targeting genomes. Nat Biotechnol 32, 347-355 (2014).
[0183] 2. Hsu, P.D., Lander, E.S. & Zhang, F. Development and applications of CRISPR-Cas9 for genome engineering. Cell 157, 1262-1278 (2014).
[0184] 3. Doudna, J.A. & Charpentier, E. Genome editing. The new frontier of genome engineering with CRISPR-Cas9. Science 346, 1258096 (2014).
[0185] 4. Barrangou, R. & May, A.P. Unraveling the potential of CRISPR-Cas9 for gene therapy. Expert Opin Biol Ther 15, 311-314 (2015).
[0186] 5. Jinek, M. et al. A programmable dual-RNA-guided DNA endonuclease in adaptive bacterial immunity. Science 337, 816-821 (2012).
[0187] 6. Sternberg, S.H., Redding, S., Jinek, M., Greene, E.C. & Doudna, J.A. DNA interrogation by the CRISPR RNA-guided endonuclease Cas9. Nature 507, 62-67 (2014).
[0188] 7. Hsu, P. D. et al. DNA targeting specificity of RNA-guided Cas9 nucleases. Nat Biotechnol 31, 827-832 (2013).
[0189] 8. Tsai, S. Q. et al. GUIDE-seq enables genome-wide profiling of off-target cleavage by CRISPR-Cas nucleases. Nat Biotechnol 33, 187-197 (2015).
[0190] 9. Hou, Z. et al. Efficient genome engineering in human pluripotent stem cells using Cas9 from Neisseria meningitidis. Proc Natl Acad Sci USA (2013).
[0191] 10. Fonfara, I. et al. Phylogeny of Cas9 determines functional exchangeability of dual-RNA and Cas9 among orthologous type II CRISPR-Cas systems. Nucleic Acids Res 42, 2577-2590 (2014).
[0192] 11. Esvelt, K. M. et al. Orthogonal Cas9 proteins for RNA-guided gene regulation and editing. Nat Methods 10, 1116-1121 (2013).
[0193] 12. Cong, L. et al. Multiplex genome engineering using CRISPR/Cas systems.

[0194] Science 339, 819-823 (2013).
[0195] 13. Horvath, P. et al. Diversity, activity, and evolution of CRISPR loci in Streptococcus thermophilus. J Bacteriol 190, 1401-1412 (2008).
[0196] 14. Anders, C., Niewoehner, O., Duerst, A. & Jinek, M. Structural basis of PAM-dependent target DNA recognition by the Cas9 endonuclease. Nature 513, 569-573 (2014).
[0197] 15. Reyon, D. et al. FLASH assembly of TALENs for high-throughput genome editing. Nat Biotechnol 30, 460-465 (2012).
[0198] 16. Fu, Y. et al. High-frequency off-target mutagenesis induced by CRISPR-Cas nucleases in human cells. Nat Biotechnol 31, 822-826 (2013).
[0199] 17. Chen, Z. & Zhao, H. A highly sensitive selection method for directed evolution of homing endonucleases. Nucleic Acids Res 33, e154 (2005).
[0200] 18. Doyon, J.B., Pattanayak, V., Meyer, C.B. & Liu, D.R. Directed evolution and substrate specificity profile of homing endonuclease I-SceI. J Am Chem Soc 128, 2477-2484 (2006).
[0201] 19. Jiang, W., Bikard, D., Cox, D., Zhang, F. & Marraffini, L.A. RNA-guided editing of bacterial genomes using CRISPR-Cas systems. Nat Biotechnol 31, 233-239 (2013).
[0202] 20. Mali, P. et al. RNA-guided human genome engineering via Cas9. Science 339, 823-826 (2013).
[0203] 21. Hwang, W. Y. et al. Efficient genome editing in zebrafish using a CRISPR-Cas system. Nat Biotechnol 31, 227-229 (2013).
[0204] 22. Chylinski, K., Le Rhun, A. & Charpentier, E. The tracrRNA and Cas9 families of type II CRISPR-Cas immunity systems. RNA Biol 10, 726-737 (2013).
[0205] 23. Kleinstiver, B.P., Fernandes, A.D., Gloor, G.B. & Edgell, D.R. A unified genetic, computational and experimental framework identifies functionally relevant residues of the homing endonuclease I-BmoI. Nucleic Acids Res 38, 2411-2427 (2010).
[0206] 24. Gagnon, J. A. et al. Efficient mutagenesis by Cas9 protein-mediated oligonucleotide insertion and large-scale assessment of single-guide RNAs. PLoS One 9, e98186 (2014).

### OTHER EMBODIMENTS

[0207] It is to be understood that while the invention has been described in conjunction with the detailed description thereof, the foregoing description is intended to illustrate and not limit the scope of the invention, which is defined by the scope of the appended claims. Other aspects, advantages, and modifications are within the scope of the following claims.

1.-30. (canceled)

31. An isolated variant Streptococcus pyogenes Cas9 (SpCas9) protein, comprising an amino acid sequence that has at least 90% sequence identity to SEQ ID NO: 1, with an amino acid mutation at S1136 and optionally at one or more of the following positions: G1104, S1109, L1111, D1135, G1218, N1317, R1335, T1337.

32. The isolated variant SpCas9 protein of claim 31, further comprising mutations that decrease nuclease activity, wherein the mutations are at positions (i) D10, E762, D839, H983, or D986; and at (ii) H840 or N863.

33. The isolated variant SpCas9 protein of claim 32, wherein the mutations are:
(i) D10A or D10N, and
(ii) H840A, H840N, or H840Y.

34. The isolated variant SpCas9 protein of claim 31, comprising an amino acid sequence that has at least 95% sequence identity to the amino acid sequence of SEQ ID NO:1, with an amino acid mutation at S1136 and optionally at one or more of the following positions: G1104, S1109, L1111, D1135, G1218, N1317, R1335, T1337.

35. A fusion protein comprising the isolated variant SpCas9 protein of claim 1, fused to a heterologous functional domain, with an optional intervening linker, wherein the linker does not interfere with activity of the fusion protein.

36. The fusion protein of claim 35, wherein the heterologous functional domain is a transcriptional activation domain.

37. The fusion protein of claim 36, wherein the transcriptional activation domain is from VP64 or NF-κB p65.

38. The fusion protein of claim 35, wherein the heterologous functional domain is a transcriptional silencer or transcriptional repression domain.

39. The fusion protein of claim 38, wherein the transcriptional repression domain is a Krueppel-associated box (KRAB) domain, ERF repressor domain (ERD), or mSin3A interaction domain (SID).

40. The fusion protein of claim 38, wherein the transcriptional silencer is Heterochromatin Protein 1 (HP1).

41. The fusion protein of claim 35, wherein the heterologous functional domain is an enzyme that modifies the methylation state of DNA.

42. The fusion protein of claim 41, wherein the enzyme that modifies the methylation state of DNA is a DNA methyltransferase (DNMT) or a ten-eleven translocation (TET) protein.

43. The fusion protein of claim 42, wherein the TET protein is ten-eleven translocation 1 (TET1).

44. The fusion protein of claim 35, wherein the heterologous functional domain is an enzyme that modifies a histone subunit.

45. The fusion protein of claim 35, wherein the enzyme that modifies a histone subunit is a histone acetyltransferase (HAT), histone deacetylase (HDAC), histone methyltransferase (HMT), or histone demethylase.

46. The fusion protein of claim 35, wherein the heterologous functional domain is a biological tether.

47. The fusion protein of claim 46, wherein the biological tether is MS2, Csy4 or lambda N protein.

48. The fusion protein of claim 35, wherein the heterologous functional domain is FokI.

49. A nucleic acid encoding the isolated variant SpCas9 protein of claim 31.

50. A vector comprising the isolated nucleic acid of claim 49.

51. The vector of claim 50, wherein the isolated nucleic acid is operably linked to one or more regulatory domains for expressing the variant SpCas9 protein.

52. A host cell expressing the isolated variant SpCas9 protein of claim 31.

53. A method of altering the genome of a cell, the method comprising expressing in the cell, or contacting the cell with, the isolated variant SpCas9 protein of claim 31 or the fusion protein of claim 35, and a guide RNA having a region complementary to a selected portion of the genome of the cell.

54. The method of claim 53, wherein the isolated variant SpCas9 protein or fusion protein comprises one or more of a nuclear localization sequence, cell penetrating peptide sequence, and/or affinity tag.

55. The method of claim 53, wherein the cell is a stem cell.

56. The method of claim 55, wherein the cell is an embryonic stem cell, a mesenchymal stem cell, or an induced pluripotent stem cell; is in a living animal; or is in an embryo.

57. A method of altering a double stranded DNA (dsDNA) molecule, the method comprising contacting the dsDNA molecule with the isolated variant SpCas9 protein of claim 31 or the fusion protein of claim 35, and a guide RNA having a region complementary to a selected portion of the dsDNA molecule.

58. The method of claim 57, wherein the dsDNA molecule is in vitro.

The application's sequence listing, which the Patent Office published only in electronic form, follows.

SEQUENCE LISTING (1021 sequences)

SEQ ID NO: 1 - protein, 1368 aa, Streptococcus pyogenes [sequence omitted]

SEQ ID NO: 2 - protein, 1053 aa, Staphylococcus aureus
MKRNYILGLDIGITSVGYGIIDYETRDVIDAGVRLFKEANVENNEGRRSKRGARRLKRRRRHRIQRVKKLLFDYNLLTDHSELSGINPYEARVKGLSQKLSEEEFSAALLHLAKRRGVHNVNEVEEDTGNELSTKEQISRNSKALEEKYVAELQLERLKKDGEVRGSINRFKTSDYVKEAKQLLKVQKAYHQLDQSFIDTYIDLLETRRTYYEGPGEGSPFGWKDIKEWYEMLMGHCTYFPEELRSVKYAYNADLYNALNDLNNLVITRDENEKLEYYEKFQIIENVFKQKKKPTLKQIAKEILVNEEDIKGYRVTSTGKPEFTNLKVYHDIKDITARKEIIENAELLDQIAKILTIYQSSEDIQEELTNLNSELTQEEIEQISNLKGYTGTHNLSLKAINLILDELWHTNDNQIAIFNRLKLVPKKVDLSQQKEIPTTLVDDFILSPVVKRSFIQSIKVINAIIKKYGLPNDIIIELAREKNSKDAQKMINEMQKRNRQTNERIEEIIRTTGKENAKYLIEKIKLHDMQEGKCLYSLEAIPLEDLLNNPFNYEVDHIIPRSVSFDNSFNNKVLVKQEENSKKGNRTPFQYLSSSDSKISYETFKKHILNLAKGKGRISKTKKEYLLEERDINRFSVQKDFINRNLVDTRYATRGLMNLLRSYFRVNNLDVKVKSINGGFTSFLRRKWKFKKERNKGYKHHAEDALIIANADFIFKEWKKLDKAKKVMENQMFEEKQAESMPEIETEQEYKEIFITPHQIKHIKDFKDYKYSHRVDKKPNRELINDTLYSTRKDDKGNTLIVNNLNGLYDKDNDKLKKLINKSPEKLLMYHHDPQTYQKLKLIMEQYGDEKNPLYKYYEETGNYLTKYSKKDNGPVIKKIKYYGNKLNAHLDITDDYPNSRNKVVKLSLKPYRFDVYLDNGVYKFVTVKNLDVIKKENYYEVNSKCYEEAKKLKKISNQAEFIASFYNNDLIKINGELYRVIGVNNDLLNRIEVNMIDITYREYLENMNDKRPPRIIKTIASKTQSIKKYSTDILGNLYEVKSKKHPQIIKKG

SEQ ID NO: 3-6 - skipped (4 entries)

SEQ ID NO: 7 - DNA, 4572 bp, synthetic construct
  misc_feature 1..4572: note = Description of Artificial Sequence: Synthetic polynucleotide
  source 1..4572: mol_type = other DNA
taatacgactcactataggggaattgtgagcggataacaattcccctgtagaaataattttgtttaactttaataaggagatataccatggataaaaagtattctattggtttagacatcggcactaattccgttggatgggctgtcataaccgatgaatacaaagtaccttcaaagaaatttaaggtgttggggaacacagaccgtcattcgattaaaaagaatcttatcggtgccctcctattcgatagtggcgaaacggcagaggcgactcgcctgaaacgaaccgctcggagaaggtatacacgtcgcaagaaccgaatatgttacttacaagaaatttttagcaatgagatggccaaagttgacgattctttctttcaccgtttggaagagtccttccttgtcgaagaggacaagaaacatgaacggcaccccatctttggaaacatagtagatgaggtggcatatcatgaaaagtacccaacgatttatcacctcagaaaaaagctagttgactcaactgataaagcggacctgaggttaatctacttggctcttgcccatatgataaagttccgtgggcactttctcattgagggtgatctaaatccggacaactcggatgtcgacaaactgttcatccagttagtacaaacctataatcagttgtttgaagagaaccctataaatgcaagtggcgtggatgcgaaggctattcttagcgcccgcctctctaaatcccgacggctagaaaacctgatcgcacaattacccggagagaagaaaaatgggttgttcggtaaccttatagcgctctcactaggcctgacaccaaattttaagtcgaacttcgacttagctgaagatgccaaattgcagcttagtaaggacacgtacgatgacgatctcgacaatctactggcacaaattggagatcagtatgcggacttatttttggctgccaaaaaccttagcgatgcaatcctcctatctgacatactgagagttaatactgagattaccaaggcgccgttatccgcttcaatgatcaaaaggtacgatgaacatcaccaagacttgacacttctcaaggccctagtccgtcagcaactgcctgagaaatataaggaaatattctttgatcagtcgaaaaacgggtacgcaggttatattgacggcggagcgagtcaagaggaattctacaagtttatcaaacccatattagagaagatggatgggacggaagagttgcttgtaaaactcaatcgcgaagatctactgcgaaagcagcggactttcgacaacggtagcattccacatcaaatccacttaggcgaattgcatgctatacttagaaggcaggaggatttttatccgttcctcaaagacaatcgtgaaaagattgagaaaatcctaacctttcgcataccttactatgtgggacccctggcccgagggaactctcggttcgcatggatgacaagaaagtccgaagaaacgattactccctggaattttgaggaagttgtcgataaaggtgcgtcagctcaatcgttcatcgagaggatgaccaactttgacaagaatttaccgaacgaaaaagtattgcctaagcacagtttactttacgagtatttcacagtgtacaatgaactcacgaaagttaagtatgtcactgagggcatgcgtaaacccgcctttctaagcggagaacagaagaaagcaatagtagatctgttattcaagaccaaccgcaaagtgacagttaagcaattgaaagaggactactttaagaaaattgaatgcttcgattctgtcgagatctccggggtagaagatcgatttaatgcgtcacttggtacgtatcatgacctcctaaagataattaaagataaggacttcctggataacgaagagaatgaagatatcttagaagatatagtgttgactcttaccctctttgaagatcgggaaatgattgaggaaagactaaaaacatacgctcacctgttcgacgataaggttatgaaacagttaaagaggcgtcgctatacgggctggggacgattgtcgcggaaacttatcaacgggataagagacaagcaaagtggtaaaactattctcgattttctaaagagcgacggcttcgccaataggaactttatgcagctgatccatgatgactctttaaccttcaaagaggatatacaaaaggcacaggtttccggacaaggggactcattgcacgaacatattgcgaatcttgctggttcgccagccatcaaaaagggcatactccagacagtcaaagtagtggatgagctagttaaggtcatgggacgtcacaaaccggaaaacattgtaatcgagatggcacgcgaaaatcaaacgactcagaaggggcaaaaaaacagtcgagagcggatgaagagaatagaagagggtattaaagaactgggcagccagatcttaaaggagcatcctgtggaaaatacccaattgcagaacgagaaactttacctctattacctacaaaatggaagggacatgtatgttgatcaggaactggacataaaccgtttatctgattacgacgtcgatcacattgtaccccaatcctttttgaaggacgattcaatcgacaataaagtgcttacacgctcggataagaaccgagggaaaagtgacaatgttccaagcgaggaagtcgtaaagaaaatgaagaactattggcggcagctcctaaatgcgaaactgataacgcaaagaaagttcgataacttaactaaagctgagaggggtggcttgtctgaacttgacaaggccggatttattaaacgtcagctcgtggaaacccgccaaatcacaaagcatgttgcacagatactagattcccgaatgaatacgaaatacgacgagaacgataagctgattcgggaagtcaaagtaatcactttaaagtcaaaattggtgtcggacttcagaaaggattttcaattctataaagttagggagataaataactaccaccatgcgcacgacgcttatcttaatgccgtcgtagggaccgcactcattaagaaatacccgaagctagaaagtgagtttgtgtatggtgattacaaagtttatgacgtccgtaagatgatcgcgaaaagcgaacaggagataggcaaggctacagccaaatacttcttttattctaacattatgaatttctttaagacggaaatcactctggcaaacggagagatacgcaaacgacctttaattgaaaccaatggggagacaggtgaaatcgtatgggataagggccgggacttcgcgacggtgagaaaagttttgtccatgccccaagtcaacatagtaaagaaaactgaggtgcagaccggagggttttcaaaggaatcgattcttccaaaaaggaatagtgataagctcatcgctcgtaaaaaggactgggacccgaaaaagtacggtggcttcgatagccctacagttgcctattctgtcctagtagtggcaaaagttgagaagggaaaatccaagaaactgaagtcagtcaaagaattattggggataacgattatggagcgctcgtcttttgaaaagaaccccatcgacttccttgaggcgaaaggttacaaggaagtaaaaaaggatctcataattaaactaccaaagtatagtctgtttgagttagaaaatggccgaaaacggatgttggctagcgccggagagcttcaaaaggggaacgaactcgcactaccgtctaaatacgtgaatttcctgtatttagcgtcccattacgagaagttgaaaggttcacctgaagataacgaacagaagcaactttttgttgagcagcacaaacattatctcgacgaaatcatagagcaaatttcggaattcagtaagagagtcatcctagctgatgccaatctggacaaagtattaagcgcatacaacaagcacagggataaacccatacgtgagcaggcggaaaatattatccatttgtttactcttaccaacctcggcgctccagccgcattcaagtattttgacacaacgatagatcgcaaacgatacacttctaccaaggaggtgctagacgcgacactgattcaccaatccatcacgggattatatgaaactcggatagatttgtcacagcttgggggtgacggatcccccaagaagaagaggaaagtctcgagcgactacaaagaccatgacggtgattataaagatcatgacatcgattacaaggatgacgatgacaagtgaagcggccgcataatgcttaagtcgaacagaaagtaatcgtattgtacacggccgcataatcgaaattaatacgactcactatagggagacccatgccatagcgttgttcggaacagattcaccaacacctagtggtctccgttttagagctagaaatagcaagttaaaataaggctagtccgttatcaacttgaaaaagtggcaccgagtcggtgctccgctgagcaataactagcataaccccttggggcctctaaacgggtcttgaggggttttttg

SEQ ID NO: 8 - DNA, 4572 bp, synthetic construct
  misc_feature 1..4572: note = Description of Artificial Sequence: Synthetic polynucleotide
  source 1..4572: mol_type = other DNA
taatacgactcactataggggaattgtgagcggataacaattcccctgtagaaataattttgtttaactttaataaggagatataccatggataaaaagtattctattggtttagccatcggcactaattccgttggatgggctgtcataaccgatgaatacaaagtaccttcaaagaaatttaaggtgttggggaacacagaccgtcattcgattaaaaagaatcttatcggtgccctcctattcgatagtggcgaaacggcagaggcgactcgcctgaaacgaaccgctcggagaaggtatacacgtcgcaagaaccgaatatgttacttacaagaaatttttagcaatgagatggccaaagttgacgattctttctttcaccgtttggaagagtccttccttgtcgaagaggacaagaaacatgaacggcaccccatctttggaaacatagtagatgaggtggcatatcatgaaaagtacccaacgatttatcacctcagaaaaaagctagttgactcaactgataaagcggacctgaggttaatctacttggctcttgcccatatgataaagttccgtgggcactttctcattgagggtgatctaaatccggacaactcggatgtcgacaaactgttcatccagttagtacaaacctataatcagttgtttgaagagaaccctataaatgcaagtggcgtggatgcgaaggctattcttagcgcccgcctctctaaatcccgacggctagaaaacctgatcgcacaattacccggagagaagaaaaatgggttgttcggtaaccttatagcgctctcactaggcctgacaccaaattttaagtcgaacttcgacttagctgaagatgccaaattgcagcttagtaaggacacgtacgatgacgatctcgacaatctactggcacaaattggagatcagtatgcggacttatttttggctgccaaaaaccttagcgatgcaatcctcctatctgacatactgagagttaatactgagattaccaaggcgccgttatccgcttcaatgatcaaaaggtacgatgaacatcaccaagacttgacacttctcaaggccctagtccgtcagcaactgcctgagaaatataaggaaatattctttgatcagtcgaaaaacgggtacgcaggttatattgacggcggagcgagtcaagaggaattctacaagtttatcaaacccatattagagaagatggatgggacggaagagttgcttgtaaaactcaatcgcgaagatctactgcgaaagcagcggactttcgacaacggtagcattccacatcaaatccacttaggcgaattgcatgctatacttagaaggcaggaggatttttatccgttcctcaaagacaatcgtgaaaagattgagaaaatcctaacctttcgcataccttactatgtgggacccctggcccgagggaactctcggttcgcatggatgacaagaaagtccgaagaaacgattactccctggaattttgaggaagttgtcgataaaggtgcgtcagctcaatcgttcatcgagaggatgaccaactttgacaagaatttaccgaacgaaaaagtattgcctaagcacagtttactttacgagtatttcacagtgtacaatgaactcacgaaagttaagtatgtcactgagggcatgcgtaaacccgcctttctaagcggagaacagaagaaagcaatagtagatctgttattcaagaccaaccgcaaagtgacagttaagcaattgaaagaggactactttaagaaaattgaatgcttcgattctgtcgagatctccggggtagaagatcgatttaatgcgtcacttggtacgtatcatgacctcctaaagataattaaagataaggacttcctggataacgaagagaatgaagatatcttagaagatatagtgttgactcttaccctctttgaagatcgggaaatgattgaggaaagactaaaaacatacgctcacctgttcgacgataaggttatgaaacagttaaagaggcgtcgctatacgggctggggacgattgtcgcggaaacttatcaacgggataagagacaagcaaagtggtaaaactattctcgattttctaaagagcgacggcttcgccaataggaactttatgcagctgatccatgatgactctttaaccttcaaagaggatatacaaaaggcacaggtttccggacaaggggactcattgcacgaacatattgcgaatcttgctggttcgccagccatcaaaaagggcatactccagacagtcaaagtagtggatgagctagttaaggtcatgggacgtcacaaaccggaaaacattgtaatcgagatggcacgcgaaaatcaaacgactcagaaggggcaaaaaaacagtcgagagcggatgaagagaatagaagagggtattaaagaactgggcagccagatcttaaaggagcatcctgtggaaaatacccaattgcagaacgagaaactttacctctattacctacaaaatggaagggacatgtatgttgatcaggaactggacataaaccgtttatctgattacgacgtcgatgccattgtaccccaatcctttttgaaggacgattcaatcgacaataaagtgcttacacgctcggataagaaccgagggaaaagtgacaatgttccaagcgaggaagtcgtaaagaaaatgaagaactattggcggcagctcctaaatgcgaaactgataacgcaaagaaagttcgataacttaactaaagctgagaggggtggcttgtctgaacttgacaaggccggatttattaaacgtcagctcgtggaaacccgccaaatcacaaagcatgttgcacagatactagattcccgaatgaatacgaaatacgacgagaacgataagctgattcgggaagtcaaagtaatcactttaaagtcaaaattggtgtcggacttcagaaaggattttcaattctataaagttagggagataaataactaccaccatgcgcacgacgcttatcttaatgccgtcgtagggaccgcactcattaagaaatacccgaagctagaaagtgagtttgtgtatggtgattacaaagtttatgacgtccgtaagatgatcgcgaaaagcgaacaggagataggcaaggctacagccaaatacttcttttattctaacattatgaatttctttaagacggaaatcactctggcaaacggagagatacgcaaacgacctttaattgaaaccaatggggagacaggtgaaatcgtatgggataagggccgggacttcgcgacggtgagaaaagttttgtccatgccccaagtcaacatagtaaagaaaactgaggtgcagaccggagggttttcaaaggaatcgattcttccaaaaaggaatagtgataagctcatcgctcgtaaaaaggactgggacccgaaaaagtacggtggcttcgatagccctacagttgcctattctgtcctagtagtggcaaaagttgagaagggaaaatccaagaaactgaagtcagtcaaagaattattggggataacgattatggagcgctcgtcttttgaaaagaaccccatcgacttccttgaggcgaaaggttacaaggaagtaaaaaaggatctcataattaaactaccaaagtatagtctgtttgagttagaaaatggccgaaaacggatgttggctagcgccggagagcttcaaaaggggaacgaactcgcactaccgtctaaatacgtgaatttcctgtatttagcgtcccattacgagaagttgaaaggttcacctgaagataacgaacagaagcaactttttgttgagcagcacaaacattatctcgacgaaatcatagagcaaatttcggaattcagtaagagagtcatcctagctgatgccaatctggacaaagtattaagcgcatacaacaagcacagggataaacccatacgtgagcaggcggaaaatattatccatttgtttactcttaccaacctcggcgctccagccgcattcaagtattttgacacaacgatagatcgcaaacgatacacttctaccaaggaggtgctagacgcgacactgattcaccaatccatcacgggattatatgaaactcggatagatttgtcacagcttgggggtgacggatcccccaagaagaagaggaaagtctcgagcgactacaaagaccatgacggtgattataaagatcatgacatcgattacaaggatgacgatgacaagtgaagcggccgcataatgcttaagtcgaacagaaagtaatcgtattgtacacggccgcataatcgaaattaatacgactcactatagggagacccatgccatagcgttgttcggaacagattcaccaacacctagtggtctccgttttagagctagaaatagcaagttaaaataaggctagtccgttatcaacttgaaaaagtggcaccgagtcggtgctccgctgagcaataactagcataaccccttggggcctctaaacgggtcttgaggggttttttg

SEQ ID NO: 9 - DNA, 3825 bp, synthetic construct
  misc_feature 1..3825: note = Description of Artificial Sequence: Synthetic polynucleotide
  source 1..3825: mol_type = other DNA
taatacgactcactataggggaattgtgagcggataacaattcccctgtagaaataattttgtttaactttaataaggagatataccatgggcagcgacctggtgctgggcctggacatcggcatcggcagcgtgggcgtgggcatcctgaacaaggtgaccggcgagatcatccacaagaacagtcgcatcttccctgctgctcaggctgagaacaacctggtgcgccgcaccaaccgccagggtcgccggcttgctcgccgcaagaagcaccggcgcgtgcgcctgaaccgcctgttcgaggagagcggcctgatcaccgacttcaccaagatcagcatcaacctgaacccctaccagctgcgcgtgaagggcctgaccgacgagctgagcaacgaggagctgttcatcgccctgaagaacatggtgaagcaccgcggcatcagctacctggacgacgccagcgacgacggcaacagcagcgtgggcgactacgcccagatcgtgaaggagaacagcaagcagctggagaccaagacccccggccagatccagctggagcgctaccagacctacggccagctgcgcggcgacttcaccgtggagaaggacggcaagaagcaccgcctgatcaacgtgttccccaccagcgcctaccgcagcgaggccctgcgcatcctgcagacccagcaggagttcaacccccagatcaccgacgagttcatcaaccgctacctggagatcctgaccggcaagcgcaagtactaccacggccccggcaacgagaagagccgcaccgactacggccgctaccgcaccagcggcgagaccctggacaacatcttcggcatcctgatcggcaagtgcaccttctaccccgacgagttccgcgccgccaaggccagctacaccgcccaggagttcaatctgctgaacgacctgaacaacctgaccgtgcccaccgagaccaagaagctgagcaaggagcagaagaaccagatcatcaactacgtgaagaacgagaaggctatgggccccgccaagctgttcaagtacatcgccaagctgctgagctgcgacgtggccgacatcaagggctaccgcatcgacaagagcggcaaggccgagatccacaccttcgaggcctaccgcaagatgaagaccctggagaccctggacatcgagcagatggaccgagagaccctggacaagctggcctacgtgctgaccctgaacaccgagcgcgagggcatccaggaggccctggagcacgagttcgccgacggcagcttcagccagaaacaggtggacgagctggtgcagttccgcaaggccaacagcagcatcttcggcaagggctggcacaacttcagcgtgaagctgatgatggagctgatccccgagctgtacgagaccagcgaggagcagatgaccatcctgacccgcctgggcaagcagaagaccaccagcagcagcaacaagaccaagtacatcgacgagaagctgctgaccgaggagatctacaaccccgtggtggccaagagcgtgcgccaggccatcaagatcgtgaacgccgccatcaaggagtacggcgacttcgacaacatcgtgatcgagatggcccgcgagaccaacgaggacgacgagaagaaggccatccagaagatccagaaggccaacaaggacgagaaggacgccgccatgctgaaggccgccaaccagtacaacggcaaggccgagctgccccacagcgtgttccacggccacaagcagctggccaccaagatccgcctgtggcaccagcagggcgagcgctgcctgtacaccggcaagaccatcagcatccacgacctgatcaacaacagcaaccagttcgaggtggaccacatcctgcccctgagcatcaccttcgacgacagcctggccaacaaggtgctggtgtacgccaccgccaaccaggagaagggccagcgcaccccctaccaggccctggacagcatggacgacgcctggagcttccgcgagctgaaggccttcgtgcgcgagagcaagaccctgagcaacaagaagaaggagtatctgctgaccgaggaggacatcagcaagttcgacgtgcgcaagaagttcatcgagcgcaacctggtggacacccgctacgccagccgcgtggtgctgaacgccctgcaggagcacttccgcgcccacaagatcgacaccaaggtgagcgtggtgcgcggccagttcaccagccagctgcgccgccactggggcatcgagaagacccgcgacacctaccaccaccacgccgtggacgccctgatcattgcggcttctagccagctgaacctgtggaagaagcagaagaacaccctggtgagctacagcgaggaccagctgctggacatcgagaccggcgagctgatcagcgacgacgagtacaaggagagcgtgttcaaggccccctaccagcacttcgtggacaccctgaagagcaaggagttcgaggacagcatcctgttcagctaccaggtggacagcaagttcaaccgcaagatcagcgacgccaccatctacgccacccgccaggccaaggtgggcaaggacaaggccgacgagacctacgtgctgggcaagatcaaggacatctacacccaggacggctacgacgccttcatgaagatctacaagaaggacaagagcaagttcctgatgtaccgccacgacccccagaccttcgagaaggtgatcgagcccatcctggagaactaccccaacaagcagatcaacgataaaggcaaggaggtgccctgcaaccccttcctgaagtacaaggaggagcacggctacatccgcaagtacagcaagaagggcaacggccccgagatcaagagcctgaagtactacgacagcaagctgggcaaccacatcgacatcacccccaaggacagcaacaacaaggtggtgctgcagagcgtgagcccctggcgcgccgacgtgtacttcaacaagaccaccggcaagtacgagatcctggggctgaagtacgccgatctgcagtttgataaaggcacaggcacctacaagatcagccaggagaagtacaacgacatcaagaagaaggagggcgtggacagcgacagcgagttcaagttcaccctgtacaagaacgaccttctgctggtgaaggacaccgagaccaaggagcaacagctgttccgcttcctgagccgcaccatgcccaagcagaagcactacgtggagctgaagccctacgacaagcagaagttcgagggcggcgaggccctgatcaaggtgctgggcaacgtggccaacagcggccagtgcaagaagggcctgggcaagagcaacatcagcatctacaaggtgcgcaccgacgtgctgggcaaccagcacatcatcaagaacgagggcgacaagcccaagttggacttcagcagggctgaccccaagaagaagaggaaggtgtgagcggccgcataatgcttaagtcgaacagaaagtaatcgtattgtacacggccgcataatcgaaattaatacgactcactataggactgcaggtcatgccatagcgttgttcggaacagattcaccaacacctagtacctgcactcgtttttgtactctcaagatttaagtaactgtacaacgaaacttacacagttacttaaatcttgcagaagctacaaagataaggcttcatgccgaaatcaacaccctgtcattttatggcagggtgttttccgctgagcaataactagcataaccccttggggcctctaaacgggtcttgaggggttttttg

SEQ ID NO: 10 - DNA, 3674 bp, synthetic construct
  misc_feature 1..3674: note = Description of Artificial Sequence: Synthetic polynucleotide
  source 1..3674: mol_type = other DNA
taatacgactcactataggggaattgtgagcggataacaattcccctgtagaaataattttgtttaactttaataaggagatataccatgggcaaacggaactacatcctggggcttgacattgggataaccagcgttggctacggaattattgattatgagacacgcgatgtgattgacgccggggttaggctgttcaaagaggccaacgttgaaaacaacgagggaagacggagtaagcgcggagcaagaagactcaagcgcagacggagacatcggattcagagggtgaaaaagctgctcttcgattacaatctcctgaccgatcatagtgagctgagcggaatcaacccctacgaggcgcgagtgaaagggctttcccagaagctgtccgaagaggagttctccgccgcgttgctgcacctggccaaacggaggggggttcacaatgtaaacgaagtggaggaggacacgggcaatgaacttagtacgaaagaacagatcagtaggaactctaaggctctcgaagagaaatacgtcgctgagttgcagcttgagagactgaaaaaagacggcgaagtacgcggatctattaataggttcaagacttcagattacgtaaaggaagccaagcagctcctgaaagtacagaaagcgtaccatcagctcgatcagagcttcatcgatacctacatagatttgctggagacacggaggacatactacgagggcccaggggaaggatctccttttgggtggaaggacatcaaggaatggtacgagatgcttatgggacattgtacatattttccggaggagctcaggagcgtcaagtacgcctacaatgccgacctgtacaatgccctcaatgacctcaataacctcgtgattaccagggacgagaacgagaagctggagtactatgaaaagttccagattatcgagaatgtgtttaagcagaagaagaagccgacacttaagcagattgcaaaggaaatcctcgtgaatgaggaagatatcaagggatacagagtgacaagtacaggcaagcccgagttcacaaatctgaaggtgtaccacgatattaaggacataaccgcacgaaaggagataatcgaaaacgctgagctcctcgatcagatcgcaaaaattcttaccatctaccagtctagtgaggacattcaggaggaactgactaatctgaacagtgagctcacccaagaggaaattgagcagatttcaaacctgaaaggctacaccgggacgcacaatctgagcctcaaagcaatcaacctcattctggatgaactttggcacacaaatgacaaccaaattgccatattcaaccgcctgaaactggtgccaaaaaaagtggatctgtcacagcaaaaggaaatccctacaaccttggttgacgattttattctgtcccccgttgtcaagcggagcttcatccagtcaatcaaggtgatcaatgccatcattaaaaaatacggattgccaaacgatataattatcgagcttgcacgagagaagaactcaaaggacgcccagaagatgattaacgaaatgcagaagcgcaaccgccagacaaacgaacgcatagaggaaattataagaacaaccggcaaagagaatgccaagtatctgatcgagaaaatcaagctgcacgacatgcaagaaggcaagtgcctgtactctctggaagctatcccactcgaagatctgctgaataatccattcaattacgaggtggaccacatcatccctagatccgtaagctttgacaattccttcaataacaaagttctggttaaacaggaggaaaattctaaaaaagggaaccggaccccgttccagtacctgagctccagtgacagcaagattagctacgagacttttaagaaacatattctgaatctggccaaaggcaaaggcaggatcagcaagaccaagaaggagtacctcctcgaagaacgcgacattaacagatttagtgtgcagaaagatttcatcaaccgaaaccttgtcgatactcggtacgccacgagaggcctgatgaatctcctcaggagctacttccgcgtcaataatctggacgttaaagtcaagagcataaatgggggattcaccagctttctgaggagaaagtggaagtttaagaaggaacgaaacaaaggatacaagcaccatgctgaggatgctttgatcatcgctaacgcggactttatctttaaggaatggaaaaagctggataaggcaaagaaagtgatggaaaaccagatgttcgaggagaagcaggcagagtcaatgcctgagatcgagacagagcaggaatacaaggaaattttcatcacccctcatcagattaaacacataaaggacttcaaagactataaatactctcatagggtggacaaaaaacccaatcgcgagctcattaatgacaccctgtactcaacacggaaggatgataaaggtaataccttgattgtgaataatcttaatggattgtatgacaaagataacgacaagctcaagaagctgatcaacaagtctccagagaagctccttatgtatcaccacgacccacagacttatcagaaattgaaactgatcatggagcaatacggggatgagaagaacccactctacaaatattatgaggaaacaggtaattacctgaccaagtactccaagaaggataacggaccagtgatcaaaaagataaagtactatggcaacaaacttaatgcgcatttggacataactgacgattaccccaattctcgaaacaaggttgtgaagctctccctgaagccttatagatttgacgtgtacctggataatggggtttataaattcgtcaccgtgaaaaatctggacgtgatcaaaaaggagaactattatgaagtaaactcaaagtgctatgaggaggcgaagaagctgaagaagatctccaatcaggccgagttcatcgcttccttctataataacgatctcatcaagatcaatggagagctttatcgcgtcattggtgtgaacaatgacttgctgaacaggatcgaagtcaatatgatagacattacctaccgggagtatctcgaaaacatgaatgataaacggccgcctcgcatcatcaagacaatcgcatctaaaactcagtcaataaaaaagtactctaccgatatcctggggaatctctatgaagtgaagtcaaagaagcacccacaaatcattaaaaaaggtggatcccccaagaagaagaggaaagtctcgagcgactacaaagaccatgacggtgattataaagatcatgacatcgattacaaggatgacgatgacaagtaaagcggccgcataatgcttaagtcgaacagaaagtaatcgtattgtacacggccgcataatcgaaattaatacgactcactatagggagacccatgccatagcgttgttcggaacagattcaccaacacctagtggtctccgttttagtactctgtaattttaggtatgaggtagacgaaaattgtacttatacctaaaattacagaatctactaaaacaaggcaaaatgccgtgtttatctcgtcaacttgttggcgagatccgctgagcaataactagcataaccccttggggcctctaaacgggtcttgaggggttttttg

SEQ ID NO: 11 - DNA, 4206 bp, synthetic construct
  misc_feature 1..4206: note = Description of Artificial Sequence: Synthetic polynucleotide
  source 1..4206: mol_type = other DNA
atggataaaaagtattctattggtttagacatcggcactaattccgttggatgggctgtcataaccgatgaatacaaagtaccttcaaagaaatttaaggtgttggggaacacagaccgtcattcgattaaaaagaatcttatcggtgccctcctattcgatagtggcgaaacggcagaggcgactcgcctgaaacgaaccgctcggagaaggtatacacgtcgcaagaaccgaatatgttacttacaagaaatttttagcaatgagatggccaaagttgacgattctttctttcaccgtttggaagagtccttccttgtcgaagaggacaagaaacatgaacggcaccccatctttggaaacatagtagatgaggtggcatatcatgaaaagtacccaacgatttatcacctcagaaaaaagctagttgactcaactgataaagcggacctgaggttaatctacttggctcttgcccatatgataaagttccgtgggcactttctcattgagggtgatctaaatccggacaactcggatgtcgacaaactgttcatccagttagtacaaacctataatcagttgtttgaagagaaccctataaatgcaagtggcgtggatgcgaaggctattcttagcgcccgcctctctaaatcccgacggctagaaaacctgatcgcacaattacccggagagaagaaaaatgggttgttcggtaaccttatagcgctctcactaggcctgacaccaaattttaagtcgaacttcgacttagctgaagatgccaaattgcagcttagtaaggacacgtacgatgacgatctcgacaatctactggcacaaattggagatcagtatgcggacttatttttggctgccaaaaaccttagcgatgcaatcctcctatctgacatactgagagttaatactgagattaccaaggcgccgttatccgcttcaatgatcaaaaggtacgatgaacatcaccaagacttgacacttctcaaggccctagtccgtcagcaactgcctgagaaatataaggaaatattctttgatcagtcgaaaaacgggtacgcaggttatattgacggcggagcgagtcaagaggaattctacaagtttatcaaacccatattagagaagatggatgggacggaagagttgcttgtaaaactcaatcgcgaagatctactgcgaaagcagcggactttcgacaacggtagcattccacatcaaatccacttaggcgaattgcatgctatacttagaaggcaggaggatttttatccgttcctcaaagacaatcgtgaaaagattgagaaaatcctaacctttcgcataccttactatgtgggacccctggcccgagggaactctcggttcgcatggatgacaagaaagtccgaagaaacgattactccctggaattttgaggaagttgtcgataaaggtgcgtcagctcaatcgttcatcgagaggatgaccaactttgacaagaatttaccgaacgaaaaagtattgcctaagcacagtttactttacgagtatttcacagtgtacaatgaactcacgaaagttaagtatgtcactgagggcatgcgtaaacccgcctttctaagcggagaacagaagaaagcaatagtagatctgttattcaagaccaaccgcaaagtgacagttaagcaattgaaagaggactactttaagaaaattgaatgcttcgattctgtcgagatctccggggtagaagatcgatttaatgcgtcacttggtacgtatcatgacctcctaaagataattaaagataaggacttcctggataacgaagagaatgaagatatcttagaagatatagtgttgactcttaccctctttgaagatcgggaaatgattgaggaaagactaaaaacatacgctcacctgttcgacgataaggttatgaaacagttaaagaggcgtcgctatacgggctggggacgattgtcgcggaaacttatcaacgggataagagacaagcaaagtggtaaaactattctcgattttctaaagagcgacggcttcgccaataggaactttatgcagctgatccatgatgactctttaaccttcaaagaggatatacaaaaggcacaggtttccggacaaggggactcattgcacgaacatattgcgaatcttgctggttcgccagccatcaaaaagggcatactccagacagtcaaagtagtggatgagctagttaaggtcatgggacgtcacaaaccggaaaacattgtaatcgagatggcacgcgaaaatcaaacgactcagaaggggcaaaaaaacagtcgagagcggatgaagagaatagaagagggtattaaagaactgggcagccagatcttaaaggagcatcctgtggaaaatacccaattgcagaacgagaaactttacctctattacctacaaaatggaagggacatgtatgttgatcaggaactggacataaaccgtttatctgattacgacgtcgatcacattgtaccccaatcctttttgaaggacgattcaatcgacaataaagtgcttacacgctcggataagaaccgagggaaaagtgacaatgttccaagcgaggaagtcgtaaagaaaatgaagaactattggcggcagctcctaaatgcgaaactgataacgcaaagaaagttcgataacttaactaaagctgagaggggtggcttgtctgaacttgacaaggccggatttattaaacgtcagctcgtggaaacccgccaaatcacaaagcatgttgcacagatactagattcccgaatgaatacgaaatacgacgagaacgataagctgattcgggaagtcaaagtaatcactttaaagtcaaaattggtgtcggacttcagaaaggattttcaattctataaagttagggagataaataactaccaccatgcgcacgacgcttatcttaatgccgtcgtagggaccgcactcattaagaaatacccgaagctagaaagtgagtttgtgtatggtgattacaaagtttatgacgtccgtaagatgatcgcgaaaagcgaacaggagataggcaaggctacagccaaatacttcttttattctaacattatgaatttctttaagacggaaatcactctggcaaacggagagatacgcaaacgacctttaattgaaaccaatggggagacaggtgaaatcgtatgggataagggccgggacttcgcgacggtgagaaaagttttgtccatgccccaagtcaacatagtaaagaaaactgaggtgcagaccggagggttttcaaaggaatcgattcttccaaaaaggaatagtgataagctcatcgctcgtaaaaaggactgggacccgaaaaagtacggtggcttcgatagccctacagttgcctattctgtcctagtagtggcaaaagttgagaagggaaaatccaagaaactgaagtcagtcaaagaattattggggataacgattatggagcgctcgtcttttgaaaagaaccccatcgacttccttgaggcgaaaggttacaaggaagtaaaaaaggatctcataattaaactaccaaagtatagtctgtttgagttagaaaatggccgaaaacggatgttggctagcgccggagagcttcaaaaggggaacgaactcgcactaccgtctaaatacgtgaatttcctgtatttagcgtcccattacgagaagttgaaaggttcacctgaagataacgaacagaagcaactttttgttgagcagcacaaacattatctcgacgaaatcatagagcaaatttcggaattcagtaagagagtcatcctagctgatgccaatctggacaaagtattaagcgcatacaacaagcacagggataaacccatacgtgagcaggcggaaaatattatccatttgtttactcttaccaacctcggcgctccagccgcattcaagtattttgacacaacgatagatcgcaaacgatacacttctaccaaggaggtgctagacgcgacactgattcaccaatccatcacgggattatatgaaactcggatagatttgtcacagcttgggggtgacggatcccccaagaagaagaggaaagtctcgagcgactacaaagaccatgacggtgattataaagatcatgacatcgattacaaggatgacgatgacaagtga

SEQ ID NO: 12 - DNA, 4206 bp, synthetic construct
  misc_feature 1..4206: note = Description of Artificial Sequence: Synthetic polynucleotide
  source 1..4206: mol_type = other DNA
atggataaaaagtattctattggtttagacatcggcactaattccgttggatgggctgtcataaccgatgaatacaaagtaccttcaaagaaatttaaggtgttggggaacacagaccgtcattcgattaaaaagaatcttatcggtgccctcctattcgatagtggcgaaacggcagaggcgactcgcctgaaacgaaccgctcggagaaggtatacacgtcgcaagaaccgaatatgttacttacaagaaatttttagcaatgagatggccaaagttgacgattctttctttcaccgtttggaagagtccttccttgtcgaagaggacaagaaacatgaacggcaccccatctttggaaacatagtagatgaggtggcatatcatgaaaagtacccaacgatttatcacctcagaaaaaagctagttgactcaactgataaagcggacctgaggttaatctacttggctcttgcccatatgataaagttccgtgggcactttctcattgagggtgatctaaatccggacaactcggatgtcgacaaactgttcatccagttagtacaaacctataatcagttgtttgaagagaaccctataaatgcaagtggcgtggatgcgaaggctattcttagcgcccgcctctctaaatcccgacggctagaaaacctgatcgcacaattacccggagagaagaaaaatgggttgttcggtaaccttatagcgctctcactaggcctgacaccaaattttaagtcgaacttcgacttagctgaagatgccaaattgcagcttagtaaggacacgtacgatgacgatctcgacaatctactggcacaaattggagatcagtatgcggacttatttttggctgccaaaaaccttagcgatgcaatcctcctatctgacatactgagagttaatactgagattaccaaggcgccgttatccgcttcaatgatcaaaaggtacgatgaacatcaccaagacttgacacttctcaaggccctagtccgtcagcaactgcctgagaaatataaggaaatattctttgatcagtcgaaaaacgggtacgcaggttatattgacggcggagcgagtcaagaggaattctacaagtttatcaaacccatattagagaagatggatgggacggaagagttgcttgtaaaactcaatcgcgaagatctactgcgaaagcagcggactttcgacaacggtagcattccacatcaaatccacttaggcgaattgcatgctatacttagaaggcaggaggatttttatccgttcctcaaagacaatcgtgaaaagattgagaaaatcctaacctttcgcataccttactatgtgggacccctggcccgagggaactctcggttcgcatggatgacaagaaagtccgaagaaacgattactccctggaattttgaggaagttgtcgataaaggtgcgtcagctcaatcgttcatcgagaggatgaccaactttgacaagaatttaccgaacgaaaaagtattgcctaagcacagtttactttacgagtatttcacagtgtacaatgaactcacgaaagttaagtatgtcactgagggcatgcgtaaacccgcctttctaagcggagaacagaagaaagcaatagtagatctgttattcaagaccaaccgcaaagtgacagttaagcaattgaaagaggactactttaagaaaattgaatgcttcgattctgtcgagatctccggggtagaagatcgatttaatgcgtcacttggtacgtatcatgacctcctaaagataattaaagataaggacttcctggataacgaagagaatgaagatatcttagaagatatagtgttgactcttaccctctttgaagatcgggaaatgattgaggaaagactaaaaacatacgctcacctgttcgacgataaggttatgaaacagttaaagaggcgtcgctatacgggctggggacgattgtcgcggaaacttatcaacgggataagagacaagcaaagtggtaaaactattctcgattttctaaagagcgacggcttcgccaataggaactttatgcagctgatccatgatgactctttaaccttcaaagaggatatacaaaaggcacaggtttccggacaaggggactcattgcacgaacatattgcgaatcttgctggttcgccagccatcaaaaagggcatactccagacagtcaaagtagtggatgagctagttaaggtcatgggacgtcacaaaccggaaaacattgtaatcgagatggcacgcgaaaatcaaacgactcagaaggggcaaaaaaacagtcgagagcggatgaagagaatagaagagggtattaaagaactgggcagccagatcttaaaggagcatcctgtggaaaatacccaattgcagaacgagaaactttacctctattacctacaaaatggaagggacatgtatgttgatcaggaactggacataaaccgtttatctgattacgacgtcgatcacattgtaccccaatcctttttgaaggacgattcaatcgacaataaagtgcttacacgctcggataagaaccgagggaaaagtgacaatgttccaagcgaggaagtcgtaaagaaaatgaagaactattggcggcagctcctaaatgcgaaactgataacgcaaagaaagttcgataacttaactaaagctgagaggggtggcttgtctgaacttgacaaggccggatttattaaacgtcagctcgtggaaacccgccaaatcacaaagcatgttgcacagatactagattcccgaatgaatacgaaatacgacgagaacgataagctgattcgggaagtcaaagtaatcactttaaagtcaaaattggtgtcggacttcagaaaggattttcaattctataaagttagggagataaataactaccaccatgcgcacgacgcttatcttaatgccgtcgtagggaccgcactcattaagaaatacccgaagctagaaagtgagtttgtgtatggtgattacaaagtttatgacgtccgtaagatgatcgcgaaaagcgaacaggagataggcaaggctacagccaaatacttcttttattctaacattatgaatttctttaagacggaaatcactctggcaaacggagagatacgcaaacgacctttaattgaaaccaatggggagacaggtgaaatcgtatgggataagggccgggacttcgcgacggtgagaaaagttttgtccatgccccaagtcaacatagtaaagaaaactgaggtgcagaccggagggttttcaaaggaatcgattcttccaaaaaggaatagtgataagctcatcgctcgtaaaaaggactgggacccgaaaaagtacggtggcttcgtgagccctacagttgcctattctgtcctagtagtggcaaaagttgagaagggaaaatccaagaaactgaagtcagtcaaagaattattggggataacgattatggagcgctcgtcttttgaaaagaaccccatcgacttccttgaggcgaaaggttacaaggaagtaaaaaaggatctcataattaaactaccaaagtatagtctgtttgagttagaaaatggccgaaaacggatgttggctagcgccggagagcttcaaaaggggaacgaactcgcactaccgtctaaatacgtgaatttcctgtatttagcgtcccattacgagaagttgaaaggttcacctgaagataacgaacagaagcaactttttgttgagcagcacaaacattatctcgacgaaatcatagagcaaatttcggaattcagtaagagagtcatcctagctgatgccaatctggacaaagtattaagcgcatacaacaagcacagggataaacccatacgtgagcaggcggaaaatattatccatttgtttactcttaccaacctcggcgctccagccgcattcaagtattttgacacaacgatagatcgcaaacagtacagatctaccaaggaggtgctagacgcgacactgattcaccaatccatcacgggattatatgaaactcggatagatttgtcacagcttgggggtgacggatcccccaagaagaagaggaaagtctcgagcgactacaaagaccatgacggtgattataaagatcatgacatcgattacaaggatgacgatgacaagtga

SEQ ID NO: 13 - DNA, 4206 bp, synthetic construct
  misc_feature 1..4206: note = Description of Artificial Sequence: Synthetic polynucleotide
  source 1..4206: mol_type = other DNA
atggataaaaagtattctattggtttagacatcggcactaattccgttggatgggctgtcataaccgatgaatacaaagtaccttcaaagaaatttaaggtgttggggaacacagaccgtcattcgattaaaaagaatcttatcggtgccctcctattcgatagtggcgaaacggcagaggcgactcgcctgaaacgaaccgctcggagaaggtatacacgtcgcaagaaccgaatatgttacttacaagaaatttttagcaatgagatggccaaagttgacgattctttctttcaccgtttggaagagtccttccttgtcgaagaggacaagaaacatgaacggcaccccatctttggaaacatagtagatgaggtggcatatcatgaaaagtacccaacgatttatcacctcagaaaaaagctagttgactcaactgataaagcggacctgaggttaatctacttggctcttgcccatatgataaagttccgtgggcactttctcattgagggtgatctaaatccggacaactcggatgtcgacaaactgttcatccagttagtacaaacctataatcagttgtttgaagagaaccctataaatgcaagtggcgtggatgcgaaggctattcttagcgcccgcctctctaaatcccgacggctagaaaacctgatcgcacaattacccggagagaagaaaaatgggttgttcggtaaccttatagcgctctcactaggcctgacaccaaattttaagtcgaacttcgacttagctgaagatgccaaattgcagcttagtaaggacacgtacgatgacgatctcgacaatctactggcacaaattggagatcagtatgcggacttatttttggctgccaaaaaccttagcgatgcaatcctcctatctgacatactgagagttaatactgagattaccaaggcgccgttatccgcttcaatgatcaaaaggtacgatgaacatcaccaagacttgacacttctcaaggccctagtccgtcagcaactgcctgagaaatataaggaaatattctttgatcagtcgaaaaacgggtacgcaggttatattgacggcggagcgagtcaagaggaattctacaagtttatcaaacccatattagagaagatggatgggacggaagagttgcttgtaaaactcaatcgcgaagatctactgcgaaagcagcggactttcgacaacggtagcattccacatcaaatccacttaggcgaattgcatgctatacttagaaggcaggaggatttttatccgttcctcaaagacaatcgtgaaaagattgagaaaatcctaacctttcgcataccttactatgtgggacccctggcccgagggaactctcggttcgcatggatgacaagaaagtccgaagaaacgattactccctggaattttgaggaagttgtcgataaaggtgcgtcagctcaatcgttcatcgagaggatgaccaactttgacaagaatttaccgaacgaaaaagtattgcctaagcacagtttactttacgagtatttcacagtgtacaatgaactcacgaaagttaagtatgtcactgagggcatgcgtaaacccgcctttctaagcggagaacagaagaaagcaatagtagatctgttattcaagaccaaccgcaaagtgacagttaagcaattgaaagaggactactttaagaaaattgaatgcttcgattctgtcgagatctccggggtagaagatcgatttaatgcgtcacttggtacgtatcatgacctcctaaagataattaaagataaggacttcctggataacgaagagaatgaagatatcttagaagatatagtgttgactcttaccctctttgaagatcgggaaatgattgaggaaagactaaaaacatacgctcacctgttcgacgataaggttatgaaacagttaaagaggcgtcgctatacgggctggggacgattgtcgcggaaacttatcaacgggataagagacaagcaaagtggtaaaactattctcgattttctaaagagcgacggcttcgccaataggaactttatgcagctgatccatgatgactctttaaccttcaaagaggatatacaaaaggcacaggtttccggacaaggggactcattgcacgaacatattgcgaatcttgctggttcgccagccatcaaaaagggcatactccagacagtcaaagtagtggatgagctagttaaggtcatgggacgtcacaaaccggaaaacattgtaatcgagatggcacgcgaaaatcaaacgactcagaaggggcaaaaaaacagtcgagagcggatgaagagaatagaagagggtattaaagaactgggcagccagatcttaaaggagcatcctgtggaaaatacccaattgcagaacgagaaactttacctctattacctacaaaatggaagggacatgtatgttgatcaggaactggacataaaccgtttatctgattacgacgtcgatcacattgtaccccaatcctttttgaaggacgattcaatcgacaataaagtgcttacacgctcggataagaaccgagggaaaagtgacaatgttccaagcgaggaagtcgtaaagaaaatgaagaactattggcggcagctcctaaatgcgaaactgataacgcaaagaaagttcgataacttaactaaagctgagaggggtggcttgtctgaacttgacaaggccggatttattaaacgtcagctcgtggaaacccgccaaatcacaaagcatgttgcacagatactagattcccgaatgaatacgaaatacgacgagaacgataagctgattcgggaagtcaaagtaatcactttaaagtcaaaattggtgtcggacttcagaaaggattttcaattctataaagttagggagataaataactaccaccatgcgcacgacgcttatcttaatgccgtcgtagggaccgcactcattaagaaatacccgaagctagaaagtgagtttgtgtatggtgattacaaagtttatgacgtccgtaagatgatcgcgaaaagcgaacaggagataggcaaggctacagccaaatacttcttttattctaacattatgaatttctttaagacggaaatcactctggcaaacggagagatacgcaaacgacctttaattgaaaccaatggggagacaggtgaaatcgtatgggataagggccgggacttcgcgacggtgagaaaagttttgtccatgccccaagtcaacatagtaaagaaaactgaggtgcagaccggagggttttcaaaggaatcgattcttccaaaaaggaatagtgataagctcatcgctcgtaaaaaggactgggacccgaaaaagtacggtggcttcgagagccctacagttgcctattctgtcctagtagtggcaaaagttgagaagggaaaatccaagaaactgaagtcagtcaaagaattattggggataacgattatggagcgctcgtcttttgaaaagaaccccatcgacttccttgaggcgaaaggttacaaggaagtaaaaaaggatctcataattaaactaccaaagtatagtctgtttgagttagaaaatggccgaaaacggatgttggctagcgccggagagcttcaaaaggggaacgaactcgcactaccgtctaaatacgtgaatttcctgtatttagcgtcccattacgagaagttgaaaggttcacctgaagataacgaacagaagcaactttttgttgagcagcacaaacattatctcgacgaaatcatagagcaaatttcggaattcagtaagagagtcatcctagctgatgccaatctggacaaagtattaagcgcatacaacaagcacagggataaacccatacgtgagcaggcggaaaatattatccatttgtttactcttaccaacctcggcgctccagccgcattcaagtattttgacacaacgatagatcgcaaacagtacagatctaccaaggaggtgctagacgcgacactgattcaccaatccatcacgggattatatgaaactcggatagatttgtcacagcttgggggtgacggatcccccaagaagaagaggaaagtctcgagcgactacaaagaccatgacggtgattataaagatcatgacatcgattacaaggatgacgatgacaagtga

SEQ ID NO: 14 - DNA, 4206 bp, synthetic construct
  misc_feature 1..4206: note = Description of Artificial Sequence: Synthetic polynucleotide
  source 1..4206: mol_type = other DNA
atggataaaaagtattctattggtttagacatcggcactaattccgttggatgggctgtcataaccgatgaatacaaagtaccttcaaagaaatttaaggtgttggggaacacagaccgtcattcgattaaaaagaatcttatcggtgccctcctattcgatagtggcgaaacggcagaggcgactcgcctgaaacgaaccgctcggagaaggtatacacgtcgcaagaaccgaatatgttacttacaagaaatttttagcaatgagatggccaaagttgacgattctttctttcaccgtttggaagagtccttccttgtcgaagaggacaagaaacatgaacggcaccccatctttggaaacatagtagatgaggtggcatatcatgaaaagtacccaacgatttatcacctcagaaaaaagctagttgactcaactgataaagcggacctgaggttaatctacttggctcttgcccatatgataaagttccgtgggcactttctcattgagggtgatctaaatccggacaactcggatgtcgacaaactgttcatccagttagtacaaacctataatcagttgtttgaagagaaccctataaatgcaagtggcgtggatgcgaaggctattcttagcgcccgcctctctaaatcccgacggctagaaaacctgatcgcacaattacccggagagaagaaaaatgggttgttcggtaaccttatagcgctctcactaggcctgacaccaaattttaagtcgaacttcgacttagctgaagatgccaaattgcagcttagtaaggacacgtacgatgacgatctcgacaatctactggcacaaattggagatcagtatgcggacttatttttggctgccaaaaaccttagcgatgcaatcctcctatctgacatactgagagttaatactgagattaccaaggcgccgttatccgcttcaatgatcaaaaggtacgatgaacatcaccaagacttgacacttctcaaggccctagtccgtcagcaactgcctgagaaatataaggaaatattctttgatcagtcgaaaaacgggtacgcaggttatattgacggcggagcgagtcaagaggaattctacaagtttatcaaacccatattagagaagatggatgggacggaagagttgcttgtaaaactcaatcgcgaagatctactgcgaaagcagcggactttcgacaacggtagcattccacatcaaatccacttaggcgaattgcatgctatacttagaaggcaggaggatttttatccgttcctcaaagacaatcgtgaaaagattgagaaaatcctaacctttcgcataccttactatgtgggacccctggcccgagggaactctcggttcgcatggatgacaagaaagtccgaagaaacgattactccctggaattttgaggaagttgtcgataaaggtgcgtcagctcaatcgttcatcgagaggatgaccaactttgacaagaatttaccgaacgaaaaagtattgcctaagcacagtttactttacgagtatttcacagtgtacaatgaactcacgaaagttaagtatgtcactgagggcatgcgtaaacccgcctttctaagcggagaacagaagaaagcaatagtagatctgttattcaagaccaaccgcaaagtgacagttaagcaattgaaagaggactactttaagaaaattgaatgcttcgattctgtcgagatctccggggtagaagatcgatttaatgcgtcacttggtacgtatcatgacctcctaaagataattaaagataaggacttcctggataacgaagagaatgaagatatcttagaagatatagtgttgactcttaccctctttgaagatcgggaaatgattgaggaaagactaaaaacatacgctcacctgttcgacgataaggttatgaaacagttaaagaggcgtcgctatacgggctggggacgattgtcgcggaaacttatcaacgggataagagacaagcaaagtggtaaaactattctcgattttctaaagagcgacggcttcgccaataggaactttatgcagctgatccatgatgactctttaaccttcaaagaggatatacaaaaggcacaggtttccggacaaggggactcattgcacgaacatattgcgaatcttgctggttcgccagccatcaaaaagggcatactccagacagtcaaagtagtggatgagctagttaaggtcatgggacgtcacaaaccggaaaacattgtaatcgagatggcacgcgaaaatcaaacgactcagaaggggcaaaaaaacagtcgagagcggatgaagagaatagaagagggtattaaagaactgggcagccagatcttaaaggagcatcctgtggaaaatacccaattgcagaacgagaaactttacctctattacctacaaaatggaagggacatgtatgttgatcaggaactggacataaaccgtttatctgattacgacgtcgatcacattgtaccccaatcctttttgaaggacgattcaatcgacaataaagtgcttacacgctcggataagaaccgagggaaaagtgacaatgttccaagcgaggaagtcgtaaagaaaatgaagaactattggcggcagctcctaaatgcgaaactgataacgcaaagaaagttcgataacttaactaaagctgagaggggtggcttgtctgaacttgacaaggccggatttattaaacgtcagctcgtggaaacccgccaaatcacaaagcatgttgcacagatactagattcccgaatgaatacgaaatacgacgagaacgataagctgattcgggaagtcaaagtaatcactttaaagtcaaaattggtgtcggacttcagaaaggattttcaattctataaagttagggagataaataactaccaccatgcgcacgacgcttatcttaatgccgtcgtagggaccgcactcattaagaaatacccgaagctagaaagtgagtttgtgtatggtgattacaaagtttatgacgtccgtaagatgatcgcgaaaagcgaacaggagataggcaaggctacagccaaatacttcttttattctaacattatgaatttctttaagacggaaatcactctggcaaacggagagatacgcaaacgacctttaattgaaaccaatggggagacaggtgaaatcgtatgggataagggccgggacttcgcgacggtgagaaaagttttgtccatgccccaagtcaacatagtaaagaaaactgaggtgcagaccggagggttttcaaaggaatcgattcttccaaaaaggaatagtgataagctcatcgctcgtaaaaaggactgggacccgaaaaagtacggtggcttcgtgagccctacagttgcctattctgtcctagtagtggcaaaagttgagaagggaaaatccaagaaactgaagtcagtcaaagaattattggggataacgattatggagcgctcgtcttttgaaaagaaccccatcgacttccttgaggcgaaaggttacaaggaagtaaaaaaggatctcataattaaactaccaaagtatagtctgtttgagttagaaaatggccgaaaacggatgttggctagcgccagagagcttcaaaaggggaacgaactcgcactaccgtctaaatacgtgaatttcctgtatttagcgtcccattacgagaagttgaaaggttcacctgaagataacgaacagaagcaactttttgttgagcagcacaaacattatctcgacgaaatcatagagcaaatttcggaattcagtaagagagtcatcctagctgatgccaatctggacaaagtattaagcgcatacaacaagcacagggataaacccatacgtgagcaggcggaaaatattatccatttgtttactcttaccaacctcggcgctccagccgcattcaagtattttgacacaacgatagatcgcaaagagtacagatctaccaaggaggtgctagacgcgacactgattcaccaatccatcacgggattatatgaaactcggatagatttgtcacagcttgggggtgacggatcccccaagaagaagaggaaagtctcgagcgactacaaagaccatgacggtgattataaagatcatgacatcgattacaaggatgacgatgacaagtga

SEQ ID NO: 15 - DNA, 4206 bp, synthetic construct [sequence omitted]

SEQ ID NO: 16 - DNA, 3402 bp, synthetic construct
  misc_feature 1..3402: note = Description of Artificial Sequence: Synthetic polynucleotide
  source 1..3402: mol_type = other DNA
atgggcagcgacctggtgctgggcctggacatcggcatcggcagcgtgggcgtgggcatcctgaacaaggtgaccggcgagatcatccacaagaacagtcgcatcttccctgctgctcaggctgagaacaacctggtgcgccgcaccaaccgccagggtcgccggcttgctcgccgcaagaagcaccggcgcgtgcgcctgaaccgcctgttcgaggagagcggcctgatcaccgacttcaccaagatcagcatcaacctgaacccctaccagctgcgcgtgaagggcctgaccgacgagctgagcaacgaggagctgttcatcgccctgaagaacatggtgaagcaccgcggcatcagctacctggacgacgccagcgacgacggcaacagcagcgtgggcgactacgcccagatcgtgaaggagaacagcaagcagctggagaccaagacccccggccagatccagctggagcgctaccagacctacggccagctgcgcggcgacttcaccgtggagaaggacggcaagaagcaccgcctgatcaacgtgttccccaccagcgcctaccgcagcgaggccctgcgcatcctgcagacccagcaggagttcaacccccagatcaccgacgagttcatcaaccgctacctggagatcctgaccggcaagcgcaagtactaccacggccccggcaacgagaagagccgcaccgactacggccgctaccgcaccagcggcgagaccctggacaacatcttcggcatcctgatcggcaagtgcaccttctaccccgacgagttccgcgccgccaaggccagctacaccgcccaggagttcaatctgctgaacgacctgaacaacctgaccgtgcccaccgagaccaagaagctgagcaaggagcagaagaaccagatcatcaactacgtgaagaacgagaaggctatgggccccgccaagctgttcaagtacatcgccaagctgctgagctgcgacgtggccgacatcaagggctaccgcatcgacaagagcggcaaggccgagatccacaccttcgaggcctaccgcaagatgaagaccctggagaccctggacatcgagcagatggaccgagagaccctggacaagctggcctacgtgctgaccctgaacaccgagcgcgagggcatccaggaggccctggagcacgagttcgccgacggcagcttcagccagaaacaggtggacgagctggtgcagttccgcaaggccaacagcagcatcttcggcaagggctggcacaacttcagcgtgaagctgatgatggagctgatccccgagctgtacgagaccagcgaggagcagatgaccatcctgacccgcctgggcaagcagaagaccaccagcagcagcaacaagaccaagtacatcgacgagaagctgctgaccgaggagatctacaaccccgtggtggccaagagcgtgcgccaggccatcaagatcgtgaacgccgccatcaaggagtacggcgacttcgacaacatcgtgatcgagatggcccgcgagaccaacgaggacgacgagaagaaggccatccagaagatccagaaggccaacaaggacgagaaggacgccgccatgctgaaggccgccaaccagtacaacggcaaggccgagctgccccacagcgtgttccacggccacaagcagctggccaccaagatccgcctgtggcaccagcagggcgagcgctgcctgtacaccggcaagaccatcagcatccacgacctgatcaacaacagcaaccagttcgaggtggaccacatcctgcccctgagcatcaccttcgacgacagcctggccaacaaggtgctggtgtacgccaccgccaaccaggagaagggccagcgcaccccctaccaggccctggacagcatggacgacgcctggagcttccgcgagctgaaggccttcgtgcgcgagagcaagaccctgagcaacaagaagaaggagtatctgctgaccgaggaggacatcagcaagttcgacgtgcgcaagaagttcatcgagcgcaacctggtggacacccgctacgccagccgcgtggtgctgaacgccctgcaggagcacttccgcgcccacaagatcgacaccaaggtgagcgtggtgcgcggccagttcaccagccagctgcgccgccactggggcatcgagaagacccgcgacacctaccaccaccacgccgtggacgccctgatcattgcggcttctagccagctgaacctgtggaagaagcagaagaacaccctggtgagctacagcgaggaccagctgctggacatcgagaccggcgagctgatcagcgacgacgagtacaaggagagcgtgttcaaggccccctaccagcacttcgtggacaccctgaagagcaaggagttcgaggacagcatcctgttcagctaccaggtggacagcaagttcaaccgcaagatcagcgacgccaccatctacgccacccgccaggccaaggtgggcaaggacaaggccgacgagacctacgtgctgggcaagatcaaggacatctacacccaggacggctacgacgccttcatgaagatctacaagaaggacaagagcaagttcctgatgtaccgccacgacccccagaccttcgagaaggtgatcgagcccatcctggagaactaccccaacaagcagatcaacgataaaggcaaggaggtgccctgcaaccccttcctgaagtacaaggaggagcacggctacatccgcaagtacagcaagaagggcaacggccccgagatcaagagcctgaagtactacgacagcaagctgggcaaccacatcgacatcacccccaaggacagcaacaacaaggtggtgctgcagagcgtgagcccctggcgcgccgacgtgtacttcaacaagaccaccggcaagtacgagatcctggggctgaagtacgccgatctgcagtttgataaaggcacaggcacctacaagatcagccaggagaagtacaacgacatcaagaagaaggagggcgtggacagcgacagcgagttcaagttcaccctgtacaagaacgaccttctgctggtgaaggacaccgagaccaaggagcaacagctgttccgcttcctgagccgcaccatgcccaagcagaagcactacgtggagctgaagccctacgacaagcagaagttcgagggcggcgaggccctgatcaaggtgctgggcaacgtggccaacagcggccagtgcaagaagggcctgggcaagagcaacatcagcatctacaaggtgcgcaccgacgtgctgggcaaccagcacatcatcaagaacgagggcgacaagcccaagttggacttcagcagggctgaccccaagaagaagaggaaggtgtga

SEQ ID NO: 17 - DNA, 3264 bp, synthetic construct
  misc_feature 1..3264: note = Description of Artificial Sequence: Synthetic polynucleotide
  source 1..3264: mol_type = other DNA
atggggaaacggaactacatcctggggcttgacattgggataaccagcgttggctacggaattattgattatgagacacgcgatgtgattgacgccggggttaggctgttcaaagaggccaacgttgaaaacaacgagggaagacggagtaagcgcggagcaagaagactcaagcgcagacggagacatcggattcagagggtgaaaaagctgctcttcgattacaatctcctgaccgatcatagtgagctgagcggaatcaacccctacgaggcgcgagtgaaagggctttcccagaagctgtccgaagaggagttctccgccgcgttgctgcacctggccaaacggaggggggttcacaatgtaaacgaagtggaggaggacacgggcaatgaacttagtacgaaagaacagatcagtaggaactctaaggctctcgaagagaaatacgtcgctgagttgcagcttgagagactgaaaaaagacggcgaagtacgcggatctattaataggttcaagacttcagattacgtaaaggaagccaagcagctcctgaaagtacagaaagcgtaccatcagctcgatcagagcttcatcgatacctacatagatttgctggagacacggaggacatactacgagggcccaggggaaggatctccttttgggtggaaggacatcaaggaatggtacgagatgcttatgggacattgtacatattttccggaggagctcaggagcgtcaagtacgcctacaatgccgacctgtacaatgccctcaatgacctcaataacctcgtgattaccagggacgagaacgagaagctggagtactatgaaaagttccagattatcgagaatgtgtttaagcagaagaagaagccgacacttaagcagattgcaaaggaaatcctcgtgaatgaggaagatatcaagggatacagagtgacaagtacaggcaagcccgagttcacaaatctgaaggtgtaccacgatattaaggacataaccgcacgaaaggagataatcgaaaacgctgagctcctcgatcagatcgcaaaaattcttaccatctaccagtctagtgaggacattcaggaggaactgactaatctgaacagtgagctcacccaagaggaaattgagcagatttcaaacctgaaaggctacaccgggacgcacaatctgagcctcaaagcaatcaacctcattctggatgaactttggcacacaaatgacaaccaaattgccatattcaaccgcctgaaactggtgccaaaaaaagtggatctgtcacagcaaaaggaaatccctacaaccttggttgacgattttattctgtcccccgttgtcaagcggagcttcatccagtcaatcaaggtgatcaatgccatcattaaaaaatacggattgccaaacgatataattatcgagcttgcacgagagaagaactcaaaggacgcccagaagatgattaacgaaatgcagaagcgcaaccgccagacaaacgaacgcatagaggaaattataagaacaaccggcaaagagaatgccaagtatctgatcgagaaaatcaagctgcacgacatgcaagaaggcaagtgcctgtactctctggaagctatcccactcgaagatctgctgaataatccattcaattacgaggtggaccacatcatccctagatccgtaagctttgacaattccttcaataacaaagttctggttaaacaggaggaaaattctaaaaaagggaaccggaccccgttccagtacctgagctccagtgacagcaagattagctacgagacttttaagaaacatattctgaatctggccaaaggcaaaggcaggatcagcaagaccaagaaggagtacctcctcgaagaacgcgacattaacagatttagtgtgcagaaagatttcatcaaccgaaaccttgtcgatactcggtacgccacgagaggcctgatgaatctcctcaggagctacttccgcgtcaataatctggacgttaaagtcaagagcataaatgggggattcaccagctttctgaggagaaagtggaagtttaagaaggaacgaaacaaaggatacaagcaccatgctgaggatgctttgatcatcgctaacgcggactttatctttaaggaatggaaaaagctggataaggcaaagaaagtgatggaaaaccagatgttcgaggagaagcaggcagagtcaatgcctgagatcgagacagagcaggaatacaaggaaattttcatcacccctcatcagattaaacacataaaggacttcaaagactataaatactctcatagggtggacaaaaaacccaatcgcgagctcattaatgacaccctgtactcaacacggaaggatgataaaggtaataccttgattgtgaataatcttaatggattgtatgacaaagataacgacaagctcaagaagctgatcaacaagtctccagagaagctccttatgtatcaccacgacccacagacttatcagaaattgaaactgatcatggagcaatacggggatgagaagaacccactctacaaatattatgaggaaacaggtaattacctgaccaagtactccaagaaggataacggaccagtgatcaaaaagataaagtactatggcaacaaacttaatgcgcatttggacataactgacgattaccccaattctcgaaacaaggttgtgaagctctccctgaagccttatagatttgacgtgtacctggataatggggtttataaattcgtcaccgtgaaaaatctggacgtgatcaaaaaggagaactattatgaagtaaactcaaagtgctatgaggaggcgaagaagctgaagaagatctccaatcaggccgagttcatcgcttccttctataataacgatctcatcaagatcaatggagagctttatcgcgtcattggtgtgaacaatgacttgctgaacaggatcgaagtcaatatgatagacattacctaccgggagtatctcgaaaacatgaatgataaacggccgcctcgcatcatcaagacaatcgcatctaaaactcagtcaataaaaaagtactctaccgatatcctggggaatctctatgaagtgaagtcaaagaagcacccacaaatcattaaaaaaggtggatcccccaagaagaagaggaaagtctcgagcgactacaaagaccatgacggtgattataaagatcatgacatcgattacaaggatgacgatgacaagtaa

SEQ ID NO: 18 - DNA, 422 bp, synthetic construct
  misc_feature 1..422: note = Description of Artificial Sequence: Synthetic polynucleotide
  source 1..422: mol_type = other DNA
tgtacaaaaaagcaggctttaaaggaaccaattcagtcgactggatccggtaccaaggtcgggcaggaagagggcctatttcccatgattccttcatatttgcatatacgatacaaggctgttagagagataattagaattaatttgactgtaaacacaaagatattagtacaaaatacgtgacgtagaaagtaataatttcttgggtagtttgcagttttaaaattatgttttaaaatggactatcatatgcttaccgtaacttgaaagtatttcgatttcttggctttatatatcttgtggaaaggacgaaacaccggagacgattaatgcgtctccgttttagagctagaaatagcaagttaaaataaggctagtccgttatcaacttgaaaaagtggcaccgagtcggtgcttttttt

SEQ ID NO: 19 - DNA, 471 bp, synthetic construct
  misc_feature 1..471: note = Description of Artificial Sequence: Synthetic polynucleotide
  source 1..471: mol_type = other DNA
tgtacaaaaaagcaggctttaaaggaaccaattcagtcgactggatccggtaccaaggtcgggcaggaagagggcctatttcccatgattccttcatatttgcatatacgatacaaggctgttagagagataattagaattaatttgactgtaaacacaaagatattagtacaaaatacgtgacgtagaaagtaataatttcttgggtagtttgcagttttaaaattatgttttaaaatggactatcatatgcttaccgtaacttgaaagtatttcgatttcttggctttatatatcttgtggaaaggacgaaacacccgagacgattaatgcgtctcggtttttgtactctcaagatttaagtaactgtacaacgaaacttacacagttacttaaatcttgcagaagctacaaagataaggcttcatgccgaaatcaacaccctgtcattttatggcagggtgttttttt

SEQ ID NO: 20 - DNA, 466 bp, synthetic construct
  misc_feature 1..466: note = Description of Artificial Sequence: Synthetic polynucleotide
  source 1..466: mol_type = other DNA
tgtacaaaaaagcaggctttaaaggaaccaattcagtcgactggatccggtaccaaggtcgggcaggaagagggcctatttcccatgattccttcatatttgcatatacgatacaaggctgttagagagataattagaattaatttgactgtaaacacaaagatattagtacaaaatacgtgacgtagaaagtaataatttcttgggtagtttgcagttttaaaattatgttttaaaatggactatcatatgcttaccgtaacttgaaagtatttcgatttcttggctttatatatcttgtggaaaggacgaaacacccgagacgattaatgcgtctcggttttagtactctgtaattttaggtatgaggtagacgaaaattgtacttatacctaaaattacagaatctactaaaacaaggcaaaatgccgtgtttatctcgtcaacttgttggcgagattttttt

SEQ ID NO: 21 - DNA, 3609 bp, synthetic construct
  misc_feature 1..3609: note = Description of Artificial Sequence: Synthetic polynucleotide
  source 1..3609: mol_type = other DNA
taatacgactcactataggggaattgtgagcggataacaattcccctgtagaaataattttgtttaactttaataaggagatataccatgggcaaacggaactacatcctggggcttgacattgggataaccagcgttggctacggaattattgattatgagacacgcgatgtgattgacgccggggttaggctgttcaaagaggccaacgttgaaaacaacgagggaagacggagtaagcgcggagcaagaagactcaagcgcagacggagacatcggattcagagggtgaaaaagctgctcttcgattacaatctcctgaccgatcatagtgagctgagcggaatcaacccctacgaggcgcgagtgaaagggctttcccagaagctgtccgaagaggagttctccgccgcgttgctgcacctggccaaacggaggggggttcacaatgtaaacgaagtggaggaggacacgggcaatgaacttagtacgaaagaacagatcagtaggaactctaaggctctcgaagagaaatacgtcgctgagttgcagcttgagagactgaaaaaagacggcgaagtacgcggatctattaataggttcaagacttcagattacgtaaaggaagccaagcagctcctgaaagtacagaaagcgtaccatcagctcgatcagagcttcatcgatacctacatagatttgctggagacacggaggacatactacgagggcccaggggaaggatctccttttgggtggaaggacatcaaggaatggtacgagatgcttatgggacattgtacatattttccggaggagctcaggagcgtcaagtacgcctacaatgccgacctgtacaatgccctcaatgacctcaataacctcgtgattaccagggacgagaacgagaagctggagtactatgaaaagttccagattatcgagaatgtgtttaagcagaagaagaagccgacacttaagcagattgcaaaggaaatcctcgtgaatgaggaagatatcaagggatacagagtgacaagtacaggcaagcccgagttcacaaatctgaaggtgtaccacgatattaaggacataaccgcacgaaaggagataatcgaaaacgctgagctcctcgatcagatcgcaaaaattcttaccatctaccagtctagtgaggacattcaggaggaactgactaatctgaacagtgagctcacccaagaggaaattgagcagatttcaaacctgaaaggctacaccgggacgcacaatctgagcctcaaagcaatcaacctcattctggatgaactttggcacacaaatgacaaccaaattgccatattcaaccgcctgaaactggtgccaaaaaaagtggatctgtcacagcaaaaggaaatccctacaaccttggttgacgattttattctgtcccccgttgtcaagcggagcttcatccagtcaatcaaggtgatcaatgccatcattaaaaaatacggattgccaaacgatataattatcgagcttgcacgagagaagaactcaaaggacgcccagaagatgattaacgaaatgcagaagcgcaaccgccagacaaacgaacgcatagaggaaattataagaacaaccggcaaagagaatgccaagtatctgatcgagaaaatcaagctgcacgacatgcaagaaggcaagtgcctgtactctctggaagctatcccactcgaagatctgctgaataatccattcaattacgaggtggaccacatcatccctagatccgtaagctttgacaattccttcaataacaaagttctggttaaacaggaggaaaattctaaaaaagggaaccggaccccgttccagtacctgagctccagtgacagcaagattagctacgagacttttaagaaacatattctgaatctggccaaaggcaaaggcaggatcagcaagaccaagaaggagtacctcctcgaagaacgcgacattaacagatttagtgtgcagaaagatttcatcaaccgaaaccttgtcgatactcggtacgccacgagaggcctgatgaatctcctcaggagctacttccgcgtcaataatctggacgttaaagtcaagagcataaatgggggattcaccagctttctgaggagaaagtggaagtttaagaaggaacgaaacaaaggatacaagcaccatgctgaggatgctttgatcatcgctaacgcggactttatctttaaggaatggaaaaagctggataaggcaaagaaagtgatggaaaaccagatgttcgaggagaagcaggcagagtcaatgcctgagatcgagacagagcaggaatacaaggaaattttcatcacccctcatcagattaaacacataaaggacttcaaagactataaatactctcatagggtggacaaaaaacccaatcgcgagctcattaatgacaccctgtactcaacacggaaggatgataaaggtaataccttgattgtgaataatcttaatggattgtatgacaaagataacgacaagctcaagaagctgatcaacaagtctccagagaagctccttatgtatcaccacgacccacagacttatcagaaattgaaactgatcatggagcaatacggggatgagaagaacccactctacaaatattatgaggaaacaggtaattacctgaccaagtactccaagaaggataacggaccagtgatcaaaaagataaagtactatggcaacaaacttaatgcgcatttggacataactgacgattaccccaattctcgaaacaaggttgtgaagctctccctgaagccttatagatttgacgtgtacctggataatggggtttataaattcgtcaccgtgaaaaatctggacgtgatcaaaaaggagaactattatgaagtaaactcaaagtgctatgaggaggcgaagaagctgaagaagatctccaatcaggccgagttcatcgcttccttctataataacgatctcatcaagatcaatggagagctttatcgcgtcattggtgtgaacaatgacttgctgaacaggatcgaagtcaatatgatagacattacctaccgggagtatctcgaaaacatgaatgataaacggccgcctcgcatcatcaagacaatcgcatctaaaactcagtcaataaaaaagtactctaccgatatcctggggaatctctatgaagtgaagtcaaagaagcacccacaaatcattaaaaaaggtggatcccccaagaagaagaggaaagtctcgagcgactacaaagaccatgacggtgattataaagatcatgacatcgattacaaggatgacgatgacaagtaaagcggccgcataatgcttaagtcgaacagaaagtaatcgtattgtacacggccgcataatcgaaattaatacgactcactataggggcacgggcagcttgccgggttttagtactctgtaatgaaaattacagaatctactaaaacaaggcaaaatgccgtgtttatctcgtcaacttgttggcgagattttttttccgctgagcaataactagcataaccccttggggcctctaaacgggtcttgaggggttttttg

SEQ ID NO: 22 - DNA, 3609 bp, synthetic construct
  misc_feature 1..3609: note = Description of Artificial Sequence: Synthetic polynucleotide
  source 1..3609: mol_type = other DNA
taatacgactcactataggggaattgtgagcggataacaattcccctgtagaaataattttgtttaactttaataaggagatataccatgggcaaacggaactacatcctggggcttgccattgggataaccagcgttggctacggaattattgattatgagacacgcgatgtgattgacgccggggttaggctgttcaaagaggccaacgttgaaaacaacgagggaagacggagtaagcgcggagcaagaagactcaagcgcagacggagacatcggattcagagggtgaaaaagctgctcttcgattacaatctcctgaccgatcatagtgagctgagcggaatcaacccctacgaggcgcgagtgaaagggctttcccagaagctgtccgaagaggagttctccgccgcgttgctgcacctggccaaacggaggggggttcacaatgtaaacgaagtggaggaggacacgggcaatgaacttagtacgaaagaacagatcagtaggaactctaaggctctcgaagagaaatacgtcgctgagttgcagcttgagagactgaaaaaagacggcgaagtacgcggatctattaataggttcaagacttcagattacgtaaaggaagccaagcagctcctgaaagtacagaaagcgtaccatcagctcgatcagagcttcatcgatacctacatagatttgctggagacacggaggacatactacgagggcccaggggaaggatctccttttgggtggaaggacatcaaggaatggtacgagatgcttatgggacattgtacatattttccggaggagctcaggagcgtcaagtacgcctacaatgccgacctgtacaatgccctcaatgacctcaataacctcgtgattaccagggacgagaacgagaagctggagtactatgaaaagttccagattatcgagaatgtgtttaagcagaagaagaagccgacacttaagcagattgcaaaggaaatcctcgtgaatgaggaagatatcaagggatacagagtgacaagtacaggcaagcccgagttcacaaatctgaaggtgtaccacgatattaaggacataaccgcacgaaaggagataatcgaaaacgctgagctcctcgatcagatcgcaaaaattcttaccatctaccagtctagtgaggacattcaggaggaactgactaatctgaacagtgagctcacccaagaggaaattgagcagatttcaaacctgaaaggctacaccgggacgcacaatctgagcctcaaagcaatcaacctcattctggatgaactttggcacacaaatgacaaccaaattgccatattcaaccgcctgaaactggtgccaaaaaaagtggatctgtcacagcaaaaggaaatccctacaaccttggttgacgattttattctgtcccccgttgtcaagcggagcttcatccagtcaatcaaggtgatcaatgccatcattaaaaaatacggattgccaaacgatataattatcgagcttgcacgagagaagaactcaaaggacgcccagaagatgattaacgaaatgcagaagcgcaaccgccagacaaacgaacgcatagaggaaattataagaacaaccggcaaagagaatgccaagtatctgatcgagaaaatcaagctgcacgacatgcaagaaggcaagtgcctgtactctctggaagctatcccactcgaagatctgctgaataatccattcaattacgaggtggacgccatcatccctagatccgtaagctttgacaattccttcaataacaaagttctggttaaacaggaggaaaattctaaaaaagggaaccggaccccgttccagtacctgagctccagtgacagcaagattagctacgagacttttaagaaacatattctgaatctggccaaaggcaaaggcaggatcagcaagaccaagaaggagtacctcctcgaagaacgcgacattaacagatttagtgtgcagaaagatttcatcaaccgaaaccttgtcgatactcggtacgccacgagaggcctgatgaatctcctcaggagctacttccgcgtcaataatctggacgttaaagtcaagagcataaatgggggattcaccagctttctgaggagaaagtggaagtttaagaaggaacgaaacaaaggatacaagcaccatgctgaggatgctttgatcatcgctaacgcggactttatctttaaggaatggaaaaagctggataaggcaaagaaagtgatggaaaaccagatgttcgaggagaagcaggcagagtcaatgcctgagatcgagacagagcaggaatacaaggaaattttcatcacccctcatcagattaaacacataaaggacttcaaagactataaatactctcatagggtggacaaaaaacccaatcgcgagctcattaatgacaccctgtactcaacacggaaggatgataaaggtaataccttgattgtgaataatcttaatggattgtatgacaaagataacgacaagctcaagaagctgatcaacaagtctccagagaagctccttatgtatcaccacgacccacagacttatcagaaattgaaactgatcatggagcaatacggggatgagaagaacccactctacaaatattatgaggaaacaggtaattacctgaccaagtactccaagaaggataacggaccagtgatcaaaaagataaagtactatggcaacaaacttaatgcgcatttggacataactgacgattaccccaattctcgaaacaaggttgtgaagctctccctgaagccttatagatttgacgtgtacctggataatggggtttataaattcgtcaccgtgaaaaatctggacgtgatcaaaaaggagaactattatgaagtaaactcaaagtgctatgaggaggcgaagaagctgaagaagatctccaatcaggccgagttcatcgcttccttctataataacgatctcatcaagatcaatggagagctttatcgcgtcattggtgtgaacaatgacttgctgaacaggatcgaagtcaatatgatagacattacctaccgggagtatctcgaaaacatgaatgataaacggccgcctcgcatcatcaagacaatcgcatctaaaactcagtcaataaaaaagtactctaccgatatcctggggaatctctatgaagtgaagtcaaagaagcacccacaaatcattaaaaaaggtggatcccccaagaagaagaggaaagtctcgagcgactacaaagaccatgacggtgattataaagatcatgacatcgattacaaggatgacgatgacaagtaaagcggccgcataatgcttaagtcgaacagaaagtaatcgtattgtacacggccgcataatcgaaattaatacgactcactataggggcacgggcagcttgccgggttttagtactctgtaatgaaaattacagaatctactaaaacaaggcaaaatgccgtgtttatctcgtcaacttgttggcgagattttttttccgctgagcaataactagcataaccccttggggcctctaaacgggtcttgaggggttttttg

SEQ ID NO: 23 - DNA, 3609 bp, synthetic construct
  misc_feature 1..3609: note = Description of Artificial Sequence: Synthetic polynucleotide
  source 1..3609: mol_type = other DNA
taatacgactcactataggggaattgtgagcggataacaattcccctgtagaaataattttgtttaactttaataaggagatataccatgggcaaacggaactacatcctggggcttgacattgggataaccagcgttggctacggaattattgattatgagacacgcgatgtgattgacgccggggttaggctgttcaaagaggccaacgttgaaaacaacgagggaagacggagtaagcgcggagcaagaagactcaagcgcagacggagacatcggattcagagggtgaaaaagctgctcttcgattacaatctcctgaccgatcatagtgagctgagcggaatcaacccctacgaggcgcgagtgaaagggctttcccagaagctgtccgaagaggagttctccgccgcgttgctgcacctggccaaacggaggggggttcacaatgtaaacgaagtggaggaggacacgggcaatgaacttagtacgaaagaacagatcagtaggaactctaaggctctcgaagagaaatacgtcgctgagttgcagcttgagagactgaaaaaagacggcgaagtacgcggatctattaataggttcaagacttcagattacgtaaaggaagccaagcagctcctgaaagtacagaaagcgtaccatcagctcgatcagagcttcatcgatacctacatagatttgctggagacacggaggacatactacgagggcccaggggaaggatctccttttgggtggaaggacatcaaggaatggtacgagatgcttatgggacattgtacatattttccggaggagctcaggagcgtcaagtacgcctacaatgccgacctgtacaatgccctcaatgacctcaataacctcgtgattaccagggacgagaacgagaagctggagtactatgaaaagttccagattatcgagaatgtgtttaagcagaagaagaagccgacacttaagcagattgcaaaggaaatcctcgtgaatgaggaagatatcaagggatacagagtgacaagtacaggcaagcccgagttcacaaatctgaaggtgtaccacgatattaaggacataaccgcacgaaaggagataatcgaaaacgctgagctcctcgatcagatcgcaaaaattcttaccatctaccagtctagtgaggacattcaggaggaactgactaatctgaacagtgagctcacccaagaggaaattgagcagatttcaaacctgaaaggctacaccgggacgcacaatctgagcctcaaagcaatcaacctcattctggatgaactttggcacacaaatgacaaccaaattgccatattcaaccgcctgaaactggtgccaaaaaaagtggatctgtcacagcaaaaggaaatccctacaaccttggttgacgattttattctgtcccccgttgtcaagcggagcttcatccagtcaatcaaggtgatcaatgccatcattaaaaaatacggattgccaaacgatataattatcgagcttgcacgagagaagaactcaaaggacgcccagaagatgattaacgaaatgcagaagcgcaaccgccagacaaacgaacgcatagaggaaattataagaacaaccggcaaagagaatgccaagtatctgatcgagaaaatcaagctgcacgacatgcaagaaggcaagtgcctgtactctctggaagctatcccactcgaagatctgctgaataatccattcaattacgaggtggaccacatcatccctagatccgtaagctttgacaattccttcaataacaaagttctggttaaacaggaggaaaattctaaaaaagggaaccggaccccgttccagtacctgagctccagtgacagcaagattagctacgagacttttaagaaacatattctgaatctggccaaaggcaaaggcaggatcagcaagaccaagaaggagtacctcctcgaagaacgcgacattaacagatttagtgtgcagaaagatttcatcaaccgaaaccttgtcgatactcggtacgccacgagaggcctgatgaatctcctcaggagctacttccgcgtcaataatctggacgttaaagtcaagagcataaatgggggattcaccagctttctgaggagaaagtggaagtttaagaaggaacgaaacaaaggatacaagcaccatgctgaggatgctttgatcatcgctaacgcggactttatctttaaggaatggaaaaagctggataaggcaaagaaagtgatggaaaaccagatgttcgaggagaagcaggcagagtcaatgcctgagatcgagacagagcaggaatacaaggaaattttcatcacccctcatcagattaaacacataaaggacttcaaagactataaatactctcatagggtggacaaaaaacccaatcgcaagctcattaatgacaccctgtactcaacacggaaggatgataaaggtaataccttgattgtgaataatcttaatggattgtatgacaaagataacgacaagctcaagaagctgatcaacaagtctccagagaagctccttatgtatcaccacgacccacagacttatcagaaattgaaactgatcatggagcaatacggggatgagaagaacccactctacaaatattatgaggaaacaggtaattacctgaccaagtactccaagaaggataacggaccagtgatcaaaaagataaagtactatggcaacaaacttaatgcgcatttggacataactgacgattaccccaattctcgaaacaaggttgtgaagctctccctgaagccttatagatttgacgtgtacctggataatggggtttataaattcgtcaccgtgaaaaatctggacgtgatcaaaaaggagaactattatgaagtaaactcaaagtgctatgaggaggcgaagaagctgaagaagatctccaatcaggccgagttcatcgcttccttctataagaacgatctcatcaagatcaatggagagctttatcgcgtcattggtgtgaacaatgacttgctgaacaggatcgaagtcaatatgatagacattacctaccgggagtatctcgaaaacatgaatgataaacggccgcctcacatcatcaagacaatcgcatctaaaactcagtcaataaaaaagtactctaccgatatcctggggaatctctatgaagtgaagtcaaagaagcacccacaaatcattaaaaaaggtggatcccccaagaagaagaggaaagtctcgagcgactacaaagaccatgacggtgattataaagatcatgacatcgattacaaggatgacgatgacaagtaaagcggccgcataatgcttaagtcgaacagaaagtaatcgtattgtacacggccgcataatcgaaattaatacgactcactataggggcacgggcagcttgccgggttttagtactctgtaatgaaaattacagaatctactaaaacaaggcaaaatgccgtgtttatctcgtcaacttgttggcgagattttttttccgctgagcaataactagcataaccccttggggcctctaaacgggtcttgaggggttttttg

SEQ ID NO: 24 - DNA, 3609 bp, synthetic construct
  misc_feature 1..3609: note = Description of Artificial Sequence: Synthetic polynucleotide
  source 1..3609: mol_type = other DNA
taatacgactcactataggggaattgtgagcggataacaattcccctgtagaaataattttgtttaactttaataaggagatataccatgggcaaacggaactacatcctggggcttgacattgggataaccagcgttggctacggaattattgattatgagacacgcgatgtgattgacgccggggttaggctgttcaaagaggccaacgttgaaaacaacgagggaagacggagtaagcgcggagcaagaagactcaagcgcagacggagacatcggattcagagggtgaaaaagctgctcttcgattacaatctcctgaccgatcatagtgagctgagcggaatcaacccctacgaggcgcgagtgaaagggctttcccagaagctgtccgaagaggagttctccgccgcgttgctgcacctggccaaacggaggggggttcacaatgtaaacgaagtggaggaggacacgggcaatgaacttagtacgaaagaacagatcagtaggaactctaaggctctcgaagagaaatacgtcgctgagttgcagcttgagagactgaaaaaagacggcgaagtacgcggatctattaataggttcaagacttcagattacgtaaaggaagccaagcagctcctgaaagtacagaaagcgtaccatcagctcgatcagagcttcatcgatacctacatagatttgctggagacacggaggacatactacgagggcccaggggaaggatctccttttgggtggaaggacatcaaggaatggtacgagatgcttatgggacattgtacatattttccggaggagctcaggagcgtcaagtacgcctacaatgccgacctgtacaatgccctcaatgacctcaataacctcgtgattaccagggacgagaacgagaagctggagtactatgaaaagttccagattatcgagaatgtgtttaagcagaagaagaagccgacacttaagcagattgcaaaggaaatcctcgtgaatgaggaagatatcaagggatacagagtgacaagtacaggcaagcccgagttcacaaatctgaaggtgtaccacgatattaaggacataaccgcacgaaaggagataatcgaaaacgctgagctcctcgatcagatcgcaaaaattcttaccatctaccagtctagtgaggacattcaggaggaactgactaatctgaacagtgagctcacccaagaggaaattgagcagatttcaaacctgaaaggctacaccgggacgcacaatctgagcctcaaagcaatcaacctcattctggatgaactttggcacacaaatgacaaccaaattgccatattcaaccgcctgaaactggtgccaaaaaaagtggatctgtcacagcaaaaggaaatccctacaaccttggttgacgattttattctgtcccccgttgtcaagcggagcttcatccagtcaatcaaggtgatcaatgccatcattaaaaaatacggattgccaaacgatataattatcgagcttgcacgagagaagaactcaaaggacgcccagaagatgattaacgaaatgcagaagcgcaaccgccagacaaacgaacgcatagaggaaattataagaacaaccggcaaagagaatgccaagtatctgatcgagaaaatcaagctgcacgacatgcaagaaggcaagtgcctgtactctctggaagctatcccactcgaagatctgctgaataatccattcaattacgaggtggaccacatcatccctagatccgtaagctttgacaattccttcaataacaaagttctggttaaacaggaggaaaattctaaaaaagggaaccggaccccgttccagtacctgagctccagtgacagcaagattagctacgagacttttaagaaacatattctgaatctggccaaaggcaaaggcaggatcagcaagaccaagaaggagtacctcctcgaagaacgcgacattaacagatttagtgtgcagaaagatttcatcaaccgaaaccttgtcgatactcggtacgccacgagaggcctgatgaatctcctcaggagctacttccgcgtcaataatctggacgttaaagtcaagagcataaatgggggattcaccagctttctgaggagaaagtggaagtttaagaaggaacgaaacaaaggatacaagcaccatgctgaggatgctttgatcatcgctaacgcggactttatctttaaggaatggaaaaagctggataaggcaaagaaagtgatggaaaaccagatgttcgaggagaagcaggcagagtcaatgcctgagatcgagacagagcaggaatacaaggaaattttcatcacccctcatcagattaaacacataaaggacttcaaagactataaatactctcatagggtggacaaaaaacccaatcgcgagctcattaatgacaccctgtactcaacacggaaggatgataaaggtaataccttgattgtgaataatcttaatggattgtatgacaaagataacgacaagctcaagaagctgatcaacaagtctccagagaagctccttatgtatcaccacgacccacagacttatcagaaattgaaactgatcatggagcaatacggggatgagaagaacccactctacaaatattatgaggaaacaggtaattacctgaccaagtactccaagaaggataacggaccagtgatcaaaaagataaagtactatggcaacaaacttaatgcgcatttggacataactgacgattaccccaattctcgaaacaaggttgtgaagctctccctgaagccttatagatttgacgtgtacctggataatggggtttataaattcgtcaccgtgaaaaatctggacgtgatcaaaaaggagaactattatgaagtaaactcaaagtgctatgaggaggcgaagaagctgaagaagatctccaatcaggccgagttcatcgcttccttctataataacgatctcatcaagatcaatggagagctttatcgcgtcattggtgtgaacaatgacttgctgaacaggatcgaagtcaatatgatagacattacctaccgggagtatctcgaaaacatgaatgataaacggccgcctcgcatcatcaagacaatcgcatctaaaactcagtcaataaaaaagtactctaccgatatcctggggaatctctatgaagtgaagtcaaagaagcacccacaaatcattaaaaaaggtggatcccccaagaagaagaggaaagtctcgagcgactacaaagaccatgacggtgattataaagatcatgacatcgattacaaggatgacgatgacaagtaaagcggccgcataatgcttaagtcgaacagaaagtaatcgtattgtacacggccgcataatcgaaattaatacgactcactataggtcgccctcgaacttcacctgttttagtactctgtaatgaaaattacagaatctactaaaacaaggcaaaatgccgtgtttatctcgtcaacttgttggcgagattttttttccgctgagcaataactagcataaccccttggggcctctaaacgggtcttgaggggttttttg

SEQ ID NO: 25 - DNA, 3609 bp, synthetic construct
  misc_feature 1..3609: note = Description of Artificial Sequence: Synthetic polynucleotide
  source 1..3609: mol_type = other DNA
taatacgactcactataggggaattgtgagcggataacaattcccctgtagaaataattttgtttaactttaataaggagatataccatgggcaaacggaactacatcctggggcttgccattgggataaccagcgttggctacggaattattgattatgagacacgcgatgtgattgacgccggggttaggctgttcaaagaggccaacgttgaaaacaacgagggaagacggagtaagcgcggagcaagaagactcaagcgcagacggagacatcggattcagagggtgaaaaagctgctcttcgattacaatctcctgaccgatcatagtgagctgagcggaatcaacccctacgaggcgcgagtgaaagggctttcccagaagctgtccgaagaggagttctccgccgcgttgctgcacctggccaaacggaggggggttcacaatgtaaacgaagtggaggaggacacgggcaatgaacttagtacgaaagaacagatcagtaggaactctaaggctctcgaagagaaatacgtcgctgagttgcagcttgagagactgaaaaaagacggcgaagtacgcggatctattaataggttcaagacttcagattacgtaaaggaagccaagcagctcctgaaagtacagaaagcgtaccatcagctcgatcagagcttcatcgatacctacatagatttgctggagacacggaggacatactacgagggcccaggggaaggatctccttttgggtggaaggacatcaaggaatggtacgagatgcttatgggacattgtacatattttccggaggagctcaggagcgtcaagtacgcctacaatgccgacctgtacaatgccctcaatgacctcaataacctcgtgattaccagggacgagaacgagaagctggagtactatgaaaagttccagattatcgagaatgtgtttaagcagaagaagaagccgacacttaagcagattgcaaaggaaatcctcgtgaatgaggaagatatcaagggatacagagtgacaagtacaggcaagcccgagttcacaaatctgaaggtgtaccacgatattaaggacataaccgcacgaaaggagataatcgaaaacgctgagctcctcgatcagatcgcaaaaattcttaccatctaccagtctagtgaggacattcaggaggaactgactaatctgaacagtgagctcacccaagaggaaattgagcagatttcaaacctgaaaggctacaccgggacgcacaatctgagcctcaaagcaatcaacctcattctggatgaactttggcacacaaatgacaaccaaattgccatattcaaccgcctgaaactggtgccaaaaaaagtggatctgtcacagcaaaaggaaatccctacaaccttggttgacgattttattctgtcccccgttgtcaagcggagcttcatccagtcaatcaaggtgatcaatgccatcattaaaaaatacggattgccaaacgatataattatcgagcttgcacgagagaagaactcaaaggacgcccagaagatgattaacgaaatgcagaagcgcaaccgccagacaaacgaacgcatagaggaaattataagaacaaccggcaaagagaatgccaagtatctgatcgagaaaatcaagctgcacgacatgcaagaaggcaagtgcctgtactctctggaagctatcccactcgaagatctgctgaataatccattcaattacgaggtggacgccatcatccctagatccgtaagctttgacaattccttcaataacaaagttctggttaaacaggaggaaaattctaaaaaagggaaccggaccccgttccagtacctgagctccagtgacagcaagattagctacgagacttttaagaaacatattctgaatctggccaaaggcaaaggcaggatcagcaagaccaagaaggagtacctcctcgaagaacgcgacattaacagatttagtgtgcagaaagatttcatcaaccgaaaccttgtcgatactcggtacgccacgagaggcctgatgaatctcctcaggagctacttccgcgtcaataatctggacgttaaagtcaagagcataaatgggggattcaccagctttctgaggagaaagtggaagtttaagaaggaacgaaacaaaggatacaagcaccatgctgaggatgctttgatcatcgctaacgcggactttatctttaaggaatggaaaaagctggataaggcaaagaaagtgatggaaaaccagatgttcgaggagaagcaggcagagtcaatgcctgagatcgagacagagcaggaatacaaggaaattttcatcacccctcatcagattaaacacataaaggacttcaaagactataaatactctcatagggtggacaaaaaacccaatcgcgagctcattaatgacaccctgtactcaacacggaaggatgataaaggtaataccttgattgtgaataatcttaatggattgtatgacaaagataacgacaagctcaagaagctgatcaacaagtctccagagaagctccttatgtatcaccacgacccacagacttatcagaaattgaaactgatcatggagcaatacggggatgagaagaacccactctacaaatattatgaggaaacaggtaattacctgaccaagtactccaagaaggataacggaccagtgatcaaaaagataaagtactatggcaacaaacttaatgcgcatttggacataactgacgattaccccaattctcgaaacaaggttgtgaagctctccctgaagccttatagatttgacgtgtacctggataatggggtttataaattcgtcaccgtgaaaaatctggacgtgatcaaaaaggagaactattatgaagtaaactcaaagtgctatgaggaggcgaagaagctgaagaagatctccaatcaggccgagttcatcgcttccttctataataacgatctcatcaagatcaatggagagctttatcgcgtcattggtgtgaacaatgacttgctgaacaggatcgaagtcaatatgatagacattacctaccgggagtatctcgaaaacatgaatgataaacggccgcctcgcatcatcaagacaatcgcatctaaaactcagtcaataaaaaagtactctaccgatatcctggggaatctctatgaagtgaagtcaaagaagcacccacaaatcattaaaaaaggtggatcccccaagaagaagaggaaagtctcgagcgactacaaagaccatgacggtgattataaagatcatgacatcgattacaaggatgacgatgacaagtaaagcggccgcataatgcttaagtcgaacagaaagtaatcgtattgtacacggccgcataatcgaaattaatacgactcactataggtcgccctcgaacttcacctgttttagtactctgtaatgaaaattacagaatctactaaaacaaggcaaaatgccgtgtttatctcgtcaacttgttggcgagattttttttccgctgagcaataactagcataaccccttggggcctctaaacgggtcttgaggggttttttg

SEQ ID NO: 26 - DNA, 3609 bp, synthetic construct
  misc_feature 1..3609: note = Description of Artificial Sequence: Synthetic polynucleotide
  source 1..3609: mol_type = other DNA
taatacgactcactataggggaattgtgagcggataacaattcccctgtagaaataattttgtttaactttaataaggagatataccatgggcaaacggaactacatcctggggcttgacattgggataaccagcgttggctacggaattattgattatgagacacgcgatgtgattgacgccggggttaggctgttcaaagaggccaacgttgaaaacaacgagggaagacggagtaagcgcggagcaagaagactcaagcgcagacggagacatcggattcagagggtgaaaaagctgctcttcgattacaatctcctgaccgatcatagtgagctgagcggaatcaacccctacgaggcgcgagtgaaagggctttcccagaagctgtccgaagaggagttctccgccgcgttgctgcacctggccaaacggaggggggttcacaatgtaaacgaagtggaggaggacacgggcaatgaacttagtacgaaagaacagatcagtaggaactctaaggctctcgaagagaaatacgtcgctgagttgcagcttgagagactgaaaaaagacggcgaagtacgcggatctattaataggttcaagacttcagattacgtaaaggaagccaagcagctcctgaaagtacagaaagcgtaccatcagctcgatcagagcttcatcgatacctacatagatttgctggagacacggaggacatactacgagggcccaggggaaggatctccttttgggtggaaggacatcaaggaatggtacgagatgcttatgggacattgtacatattttccggaggagctcaggagcgtcaagtacgcctacaatgccgacctgtacaatgccctcaatgacctcaataacctcgtgattaccagggacgagaacgagaagctggagtactatgaaaagttccagattatcgagaatgtgtttaagcagaagaagaagccgacacttaagcagattgcaaaggaaatcctcgtgaatgaggaagatatcaagggatacagagtgacaagtacaggcaagcccgagttcacaaatctgaaggtgtaccacgatattaaggacataaccgcacgaaaggagataatcgaaaacgctgagctcctcgatcagatcgcaaaaattcttaccatctaccagtctagtgaggacattcaggaggaactgactaatctgaacagtgagctcacccaagaggaaattgagcagatttcaaacctgaaaggctacaccgggacgcacaatctgagcctcaaagcaatcaacctcattctggatgaactttggcacacaaatgacaaccaaattgccatattcaaccgcctgaaactggtgccaaaaaaagtggatctgtcacagcaaaaggaaatccctacaaccttggttgacgattttattctgtcccccgttgtcaagcggagcttcatccagtcaatcaaggtgatcaatgccatcattaaaaaatacggattgccaaacgatataattatcgagcttgcacgagagaagaactcaaaggacgcccagaagatgattaacgaaatgcagaagcgcaaccgccagacaaacgaacgcatagaggaaattataagaacaaccggcaaagagaatgccaagtatctgatcgagaaaatcaagctgcacgacatgcaagaaggcaagtgcctgtactctctggaagctatcccactcgaagatctgctgaataatccattcaattacgaggtggaccacatcatccctagatccgtaagctttgacaattccttcaataacaaagttctggttaaacaggaggaaaattctaaaaaagggaaccggaccccgttccagtacctgagctccagtgacagcaagattagctacgagacttttaagaaacatattctgaatctggccaaaggcaaaggcaggatcagcaagaccaagaaggagtacctcctcgaagaacgcgacattaacagatttagtgtgcagaaagatttcatcaaccgaaaccttgtcgatactcggtacgccacgagaggcctgatgaatctcctcaggagctacttccgcgtcaataatctggacgttaaagtcaagagcataaatgggggattcaccagctttctgaggagaaagtggaagtttaagaaggaacgaaacaaaggatacaagcaccatgctgaggatgctttgatcatcgctaacgcggactttatctttaaggaatggaaaaagctggataaggcaaagaaagtgatggaaaaccagatgttcgaggagaagcaggcagagtcaatgcctgagatcgagacagagcaggaatacaaggaaattttcatcacccctcatcagattaaacacataaaggacttcaaagactataaatactctcatagggtggacaaaaaacccaatcgcaagctcattaatgacaccctgtactcaacacggaaggatgataaaggtaataccttgattgtgaataatcttaatggattgtatgacaaagataacgacaagctcaagaagctgatcaacaagtctccagagaagctccttatgtatcaccacgacccacagacttatcagaaattgaaactgatcatggagcaatacggggatgagaagaacccactctacaaatattatgaggaaacaggtaattacctgaccaagtactccaagaaggataacggaccagtgatcaaaaagataaagtactatggcaacaaacttaatgcgcatttggacataactgacgattaccccaattctcgaaacaaggttgtgaagctctccctgaagccttatagatttgacgtgtacctggataatggggtttataaattcgtcaccgtgaaaaatctggacgtgatcaaaaaggagaactattatgaagtaaactcaaagtgctatgaggaggcgaagaagctgaagaagatctccaatcaggccgagttcatcgcttccttctataagaacgatctcatcaagatcaatggagagctttatcgcgtcattggtgtgaacaatgacttgctgaacaggatcgaagtcaatatgatagacattacctaccgggagtatctcgaaaacatgaatgataaacggccgcctcacatcatcaagacaatcgcatctaaaactcagtcaataaaaaagtactctaccgatatcctggggaatctctatgaagtgaagtcaaagaagcacccacaaatcattaaaaaaggtggatcccccaagaagaagaggaaagtctcgagcgactacaaagaccatgacggtgattataaagatcatgacatcgattacaaggatgacgatgacaagtaaagcggccgcataatgcttaagtcgaacagaaagtaatcgtattgtacacggccgcataatcgaaattaatacgactcactataggtcgccctcgaacttcacctgttttagtactctgtaatgaaaattacagaatctactaaaacaaggcaaaatgccgtgtttatctcgtcaacttgttggcgagattttttttccgctgagcaataactagcataaccccttggggcctctaaacgggtcttgaggggttttttg

SEQ ID NO: 27 - DNA, 3264 bp, synthetic construct
  misc_feature 1..3264: note = Description of Artificial Sequence: Synthetic polynucleotide
  source 1..3264: mol_type = other DNA
atggggaaacggaactacatcctggggcttgacattgggataaccagcgttggctacggaattattgattatgagacacgcgatgtgattgacgccggggttaggctgttcaaagaggccaacgttgaaaacaacgagggaagacggagtaagcgcggagcaagaagactcaagcgcagacggagacatcggattcagagggtgaaaaagctgctcttcgattacaatctcctgaccgatcatagtgagctgagcggaatcaacccctacgaggcgcgagtgaaagggctttcccagaagctgtccgaagaggagttctccgccgcgttgctgcacctggccaaacggaggggggttcacaatgtaaacgaagtggaggaggacacgggcaatgaacttagtacgaaagaacagatcagtaggaactctaaggctctcgaagagaaatacgtcgctgagttgcagcttgagagactgaaaaaagacggcgaagtacgcggatctattaataggttcaagacttcagattacgtaaaggaagccaagcagctcctgaaagtacagaaagcgtaccatcagctcgatcagagcttcatcgatacctacatagatttgctggagacacggaggacatactacgagggcccaggggaaggatctccttttgggtggaaggacatcaaggaatggtacgagatgcttatgggacattgtacatattttccggaggagctcaggagcgtcaagtacgcctacaatgccgacctgtacaatgccctcaatgacctcaataacctcgtgattaccagggacgagaacgagaagctggagtactatgaaaagttccagattatcgagaatgtgtttaagcagaagaagaagccgacacttaagcagattgcaaaggaaatcctcgtgaatgaggaagatatcaagggatacagagtgacaagtacaggcaagcccgagttcacaaatctgaaggtgtaccacgatattaaggacataaccgcacgaaaggagataatcgaaaacgctgagctcctcgatcagatcgcaaaaattcttaccatctaccagtctagtgaggacattcaggaggaactgactaatctgaacagtgagctcacccaagaggaaattgagcagatttcaaacctgaaaggctacaccgggacgcacaatctgagcctcaaagcaatcaacctcattctggatgaactttggcacacaaatgacaaccaaattgccatattcaaccgcctgaaactggtgccaaaaaaagtggatctgtcacagcaaaaggaaatccctacaaccttggttgacgattttattctgtcccccgttgtcaagcggagcttcatccagtcaatcaaggtgatcaatgccatcattaaaaaatacggattgccaaacgatataattatcgagcttgcacgagagaagaactcaaaggacgcccagaagatgattaacgaaatgcagaagcgcaaccgccagacaaacgaacgcatagaggaaattataagaacaaccggcaaagagaatgccaagtatctgatcgagaaaatcaagctgcacgacatgcaagaaggcaagtgcctgtactctctggaagctatcccactcgaagatctgctgaataatccattcaattacgaggtggaccacatcatccctagatccgtaagctttgacaattccttcaataacaaagttctggttaaacaggaggaaaattctaaaaaagggaaccggaccccgttccagtacctgagctccagtgacagcaagattagctacgagacttttaagaaacatattctgaatctggccaaaggcaaaggcaggatcagcaagaccaagaaggagtacctcctcgaagaacgcgacattaacagatttagtgtgcagaaagatttcatcaaccgaaaccttgtcgatactcggtacgccacgagaggcctgatgaatctcctcaggagctacttccgcgtcaataatctggacgttaaagtcaagagcataaatgggggattcaccagctttctgaggagaaagtggaagtttaagaaggaacgaaacaaaggatacaagcaccatgctgaggatgctttgatcatcgctaacgcggactttatctttaaggaatggaaaaagctggataaggcaaagaaagtgatggaaaaccagatgttcgaggagaagcaggcagagtcaatgcctgagatcgagacagagcaggaatacaaggaaattttcatcacccctcatcagattaaacacataaaggacttcaaagactataaatactctcatagggtggacaaaaaacccaatcgcaagctcattaatgacaccctgtactcaacacggaaggatgataaaggtaataccttgattgtgaataatcttaatggattgtatgacaaagataacgacaagctcaagaagctgatcaacaagtctccagagaagctccttatgtatcaccacgacccacagacttatcagaaattgaaactgatcatggagcaatacggggatgagaagaacccactctacaaatattatgaggaaacaggtaattacctgaccaagtactccaagaaggataacggaccagtgatcaaaaagataaagtactatggcaacaaacttaatgcgcatttggacataactgacgattaccccaattctcgaaacaaggttgtgaagctctccctgaagccttatagatttgacgtgtacctggataatggggtttataaattcgtcaccgtgaaaaatctggacgtgatcaaaaaggagaactattatgaagtaaactcaaagtgctatgaggaggcgaagaagctgaagaagatctccaatcaggccgagttcatcgcttccttctataagaacgatctcatcaagatcaatggagagctttatcgcgtcattggtgtgaacaatgacttgctgaacaggatcgaagtcaatatgatagacattacctaccgggagtatctcgaaaacatgaatgataaacggccgcctcacatcatcaagacaatcgcatctaaaactcagtcaataaaaaagtactctaccgatatcctggggaatctctatgaagtgaagtcaaagaagcacccacaaatcattaaaaaaggtggatcccccaagaagaagaggaaagtctcgagcgactacaaagaccatgacggtgattataaagatcatgacatcgattacaaggatgacgatgacaagtaa

SEQ ID NO: 28 - DNA, 430 bp, synthetic construct
  misc_feature 1..430: note = Description of Artificial Sequence: Synthetic polynucleotide
  source 1..430: mol_type = other DNA
tgtacaaaaaagcaggctttaaaggaaccaattcagtcgactggatccggtaccaaggtcgggcaggaagagggcctatttcccatgattccttcatatttgcatatacgatacaaggctgttagagagataattagaattaatttgactgtaaacacaaagatattagtacaaaatacgtgacgtagaaagtaataatttcttgggtagtttgcagttttaaaattatgttttaaaatggactatcatatgcttaccgtaacttgaaagtatttcgatttcttggctttatatatcttgtggaaaggacgaaacacccgagacgattaatgcgtctcggttttagtactctgtaatgaaaattacagaatctactaaaacaaggcaaaatgccgtgtttatctcgtcaacttgttggcgagattttttt

SEQ ID NO: 29 - protein, 134 aa, Listeria innocua
QQVLPNHLVTLLHHAANCEVSDGKSLDYIESNREMFAELLAHVSEFAKRYTLAEANLNKINQLFEQNKEGDIKAIAQSFVDLMAFNAMGAPASFKFFETTIERKRYNNLKELLNSTIIYQSITGLYESRKRLDD

SEQ ID NO: 30 - protein, 139 aa, Streptococcus mutans
EIVLPNHLGTLLYHAKNIHKVDEPKHLDYVDKHKDEFKELLDVVSNFSKKYTLAEGNLEKIKELYAQNNGEDLKELASSFINLLTFTAIGAPATFKFFDKNIDRKRYTSTTEILNATLIHQSITGLYETRIDLNKLGGD

SEQ ID NO: 31 - protein, 148 aa, Streptococcus thermophilus
QIFLSQKFVKLLYHAKRISNTINENHRKYVENHKKEFEELFYYILEFNENYVGAKKNGKLLNSAFQSWQNHSIDELCSSFIGPTGSERKGLFELTSRGSAADFEFLGVKIPRYRDYTPSSLLKDATLIHQSVTGLYETRIDLAKLGEG

SEQ ID NO: 32 - protein, 175 aa, Francisella sp.
  source 1..175: note = Francisella novicida
KRKTWDNNFIYQILNDSDSRADGTKPFIPAFDISKNEIVEAIIDSFTSKNIFWLPKNIELQKVDNKNIFAIDTSKWFEVETPSDLRDIGIATIQYKIDNNSRPKVRVKLDYVIDDDSKINYFMNHSLLKSRYPDKVLEILKQSTIIEFESSGFNKTIKEMLGMKLAGIYNETSNN

SEQ ID NO: 33 - protein, 145 aa, Lactobacillus buchneri
KQLVLSDKAMQVLSKDDKLKNQDENQNLIDVYDEILEKVDQYFELYDINKFRQKLHDGRKKFIELPVDNDFNGKKLISYGKRATIISILNGLHANATMSNLKYLGISSPFGMLQVPNGIILSPASRICYQSPTGLFERKVKLSDL

SEQ ID NO: 34 - protein, 155 aa, unidentified
  source 1..155: note = Trepanoma denticola
SQREKIGKTISPYEDLSFRSYIKENLWKKTKNDEIGEKEFYDLLQKKNLEIYDMLLTKHKDTIYKKRPNSATIDILVKGKEKFKSLIIENQFEVILEILKLFSATRNVSDLQHIGGSKYSGVAKIGNKISSLDNCILIYQSITGIFEKRIDLLKV

SEQ ID NO: 35 - protein, 150 aa, Streptococcus thermophilus
NKTTGKYEILGLKYADLQFEKGTGTYKISQEKYNDIKKKEGVDSDSEFKFTLYKNDLLLVKDTETKEQQLFRFLSRTMPKQKHYVELKPYDKQKFEGGEALIKVLGNVANSGQCKKGLGKSNISIYKVRTDVLGNQHIIKNEGDKPKLDF

SEQ ID NO: 36 - protein, 128 aa, Neisseria meningitidis
KGDKYYLVPIYSWQVAKGILPDRAVVQGKDEEDWQLIDDSFNFKFSLHPNDLVEVITKKARMFGYFASCHRGTGNINIRIHDLDHKIGKNGILEGIGVKTALSFQKYQIDELGKEIRPCRLKKRPPVR

SEQ ID NO: 37 - protein, 127 aa, Pasteurella multocida
KNNKFFLVPIYTWQVAKGILPNKAIVAHKNEDEWEEMDEGAKFKFSLFPNDLVELKTKKEYFFGYYIGLDRATGNISLKEHDGEISKGKDGVYRVGVKLALSFEKYQVDELGKNRQICRPQQRQPVR

SEQ ID NO: 38 - protein, 141 aa, Campylobacter jejuni
FYAVPIYTMDFALKVLPNKAVARSKKGEIKDWILMDENYEFCFSLYKDSLILIQTKDMQEPEFVYYNAFTSSTVSLIVSKHDNKFETLSKNQKILFKNANEKEVIAKSIGIQNLKVFEKYIVSALGEVTKAEFRQREDFKK

SEQ ID NO: 39 - protein, 148 aa, Actinomyces naeslundii
QRHGDLFSAVIPPQSISMRCAEPKLRKAITTGNATYLGWVVVGDELEINVDSFTKYAIGRFLEDFPNTTRWRICGYDTNSKLTLKPIVLAAEGLENPSSAVNEIVELKGWRVAINVLTKVHPTVVRRDALGRPRYSSRSNLPTSWTIE

SEQ ID NO: 40 - protein, 135 aa, Staphylococcus aureus
DNGVYKFVTVKNLDVIKKENYYEVNSKCYEEAKKLKKISNQAEFIASFYNNDLIKINGELYRVIGVNNDLLNRIEVNMIDITYREYLENMNDKRPPRIIKTIASKTQSIKKYSTDILGNLYEVKSKKHPQIIKKG

SEQ ID NO: 41-52 - skipped (12 entries)

SEQ ID NO: 53 - protein, 402 aa, synthetic construct
  REGION 1..402: note = Description of Artificial Sequence: Synthetic polypeptide
ATRGLMNLLRSYFRVNNLDVKVKSINGGFTSFLRRKWKFKKERNKGYKHHAEDALIIANADFIFKEWKRLDKAKKVMENQMFEEKQAESMPEIETEQEYKEIFITPHQIKHIKDFKDYKYSHRVDKKPNRELINDTLYSTRKDDKGNTLIVNNLNGLYDKDNDKLKKLINKSPEKLLMYHHDPQTYQKLKLIMEQYGDEKNPLYKYYEETGNYLTKYSKKDNGPVIKKIKYYGNKLNAHLDITDDYPNSRNKVVKLSLKPYRFDVYLDNGVYKFVTVKNLDVIKKENYYEVKSKCYEEAKKLKKISNQAEFIASFYNNDLIKINGELYRVIGVNNDLLNRIEVNMIDITYREYLENMNDKRPPHIIKTIASKTQSIKKYSTDILGNLYEVKSNKHPQIIKKG

SEQ ID NO: 54 - protein, 402 aa, synthetic construct
  REGION 1..402: note = Description of Artificial Sequence: Synthetic polypeptide
ATRGLMNLLRSYFRVNNLDVKVKSINGGFTSFLRRKWKFKKERNKGYKHHAEDALIIANADFIFKEWKKLDKAKKVMENQMFEEKQAESMPEIETEQEYKEIFITPHQIKHIKDFKDYKYSHRVDKKPNRELINDTLYSTRKDDKGNTLIVNNLNGLYDKDNDKLKELINKSPEKLLMYHHDPQTYQKLKLIMEQYGDEKNPLYKYYEETGNYLTKYSKKDNGPVIKKIKYYGNKLNAHLDITDDYPNSRNMVVKLSLKPYRFDVYLDNGVYKFVTVKNLDVIKKENYYEVNSKCYEEAKKLKKISNQAEFMASFYKNDLIKFNGELYRVIGVNNDLLNRIEVNMIDITYREYLENMNDKRPPHIIKTIASKTQSIKKYSTDILGNLYEVKSKKHPQIIKKG

SEQ ID NO: 55 - protein, 402 aa, synthetic construct
  REGION 1..402: note = Description of Artificial Sequence: Synthetic polypeptide
ATRGLMNLLRSYFRVNNLDIKVKSINGGFTSFLRRKWKFKKERNKGYKHHAEDALIIANADFIFKEWKKLDKAKKVMENQMFEEKQAESMPEIETEQEYKEIFITPHQIKHIKDFKDYKYSHRVDKKPNRELINDTLYSTRKDDKGNTLIVNNLNGLYDKDNDKLKKLINKSPEKLLMYHHDPQTYQKLKLIMEQYGDEKNPLYKYYEETGNYLTKYSKKDNGPVIKKIKYYGNKLNAHLNITDDYPNSRNKVVKLSLKPYRFDVYLDNGVYKFVTVKNLDVIKKENYYEVNSKCYEEAKKLKKISNQAEFISSFYSNDLIKINGELYRVIGVNNDLLNRIEVNMIDITYREYLENMNDKRPPHIIKRIASKTQSIKKYSTDILGNLYEVKSKKHPQIIKKG

SEQ ID NO: 56 - protein, 402 aa, synthetic construct
  REGION 1..402: note = Description of Artificial Sequence: Synthetic polypeptide
ATRGLMNLLRSYFRVNNLDVKVKSINGGFTSFLRRKWKFKKERNKGYKHHAEDALIIANADFIFKEWKKLDKAKKVMENQMFEEKQAESMPEIETEQEYKEIVITPHQIKHIKDFKDYKYSHRVDKKPNRELINDTLYSTRKDDKGNTLIVNNLNGLYDKDNDKLKKLINKSPEKLLMYHHDPQTYQKLKLIMEQYGDEKNPLYKYYEETGNYLTKYSKKDNGPVIKKIKYYGNKLNAHLDITDDYPNSRNKVVKLSLKPYRFDVYLDNGVYKFVTVKNLDVIKKENYYEVNSKCYEEAKKLKKISNQAEFIASFYNNDLIKINGELYRVIGVNNDLLNRIEVNMIDITYREYLENMNDKRPPHIIKTIASKTQSIKKYSTDILGNLYEVKSKKHPEIIKKG

SEQ ID NO: 57 - protein, 402 aa, synthetic construct
  REGION 1..402: note = Description of Artificial Sequence: Synthetic polypeptide
ATRGLMNLLRSYFRVNNLDVKVKSINGGFTSFLRRKWKFKKERNKGYKHHAEDALIIANADFIFKEWKKLDKAKKVMENQMFEEKQAESMPEIETEQEYKEIFITPHQIKHIKDFKDYKYSHRVDKKPNRELINDTLYSTRKDDKGNTLIVNNLNGLYDKDNDKLKKLINKSPEKLLMYHHDPQTYQKLKLIMEQYGDEKNPLYKYYEETGNYLTKYSKKDNGPVIKKIKYYGNKLNAHLDITDDYPNSRNKVVKLSLKPYRFDVYLDNGVYKFVTVKNLDVIKKENYYEVNSKCYEEAKKLKKISNQAEFIASFYNNDLIRINGELYRVIGVNNDLLNRIEVNMIDITYREYLENMNDKRPPHIIKTIASKTQSIKKYSTDILGNLYEVKSKKHPQIIKKG

SEQ ID NO: 58 - protein, 402 aa, synthetic construct
  REGION 1..402: note = Description of Artificial Sequence: Synthetic polypeptide
ATRGLMNLLRSYFRVNNLDVKVKSIKGGFTSFLRRKWKFKKERNKGYKHHAEDALIIANADFIFKEWKKLDKAKKVMENQMFEEKQAESMPEIETEQEYKEIFITPHQIKHIKDFKDFKYSHRVDKKPNRELINDTLYSTRKDDKGNTLIVNNLNGLYDKDNDKLKKLINKSPEKLLMYHHDPQTYQKLKLIMEQYGDEKNPLYKYYEETGNYLTKYSKKDNGPVIKKIKYYGNKLNAHLDITDNYPNSRNKVVKLSLKPYRFDVYLDNGVYKFVTVKNLDVIKKENYYEVNSKCYEEAKKLKKISNQAEFIASFYNNDLIKINGELYRVIGVNNDLLNRIEVNMIDITYRGYLENMNDKRPPHIIKTIASKTQSIKKYSTDILGNLYEVKSKKHPQIIKKG

SEQ ID NO: 59 - protein, 402 aa, synthetic construct
  REGION 1..402: note = Description of Artificial Sequence: Synthetic polypeptide
ATRGLMNLLRSYFRVNNLDVKVKSINGGFTSFLRRKWKFKKERNKGYKHHAEDALIIANADFIFKEWKKLDKAKKVMENQMFEEKQAESMPEIETEQEYKEIFITPHQIKHIKDFKDYKYSHRVDKKPNRELINDTLYSTRKDDKGNTLIVNNLNGLYDKDNDKLKKLINKSPEKLLMYHHDPQTYQKLKLIMEQYGDEKNPLYKYYEETGNYLTKYSKKDNGPVIKKIKYYGNKLNAHLDITDDYPNSRNKVVKLSLKPYRFDVYLDNGVYKFVTVKNLDVIKKENYYEVNSKCYEEAKKLKKISNQAEFIASFYNNDLIKINGELYRVIGVNNDLLNRIEVNMIDITYREYLENMKDKRPPHIIKTIASKTQSIIKYSTDILGNLYEVKSKKHPQIIKKG

SEQ ID NO: 60 - protein, 402 aa, synthetic construct
  REGION 1..402: note = Description of Artificial Sequence: Synthetic polypeptide
ATRGLMNLLRSYFRVNNLDVKVKSINGGFTSFLRRKWKFKKERNKGYKHHAEDALIIANADFIFKEWKKLDKAKKVMENQMFEEKQAESMPEIETEHEYKEIFITPHQIKHIKDFKDYKYSHRVDKKPNRELINDTLYSTRKDDKGNTLIVNNLNGLYDKDNDKLKKLINKSPEKLLMYHHDPQTYQKLKLIMEQYGDEKNPLYKYYEETGNYLTKYSKKDNGPVIKKIKYYGNKLNAHLDITDDYPNSRNKVVKLSLKPYRFDVYLDNGVYKFVTVKNLDVIKKENYYEVNSKCYEEAKKLKKISNQAEFIASFYNNDLIKINGELYRVIGVNNDLLNRIEVNMIDITYREYLENMNDKRPPHIIKTIASKTQSIKKYSTDILGNLYEVKSNKHPQIIKKG

SEQ ID NO: 61 - protein, 402 aa, synthetic construct
  REGION 1..402: note = Description of Artificial Sequence: Synthetic polypeptide
ATRGLMNLLRSYFRVNNLDVKVKSINGGFTSFLRRKWKFKKERNKGYKHHAEDALIIANADFIFKEWKKLDKAKKVMENQMFEEKQAESMPEIETEQEYKEIFITPHQIKHINDFKDYKYSHRVDKKPNRELINDTLYSTRKDDKGNTLIVNNLNGLYDKDNDKLKKLINKSPEKLLMYHHDPQTYQKLKLIMEQYGDEKNPLYKYYEETGNYLTKYSKKDNGPVIKKIKYYGNKLNAHLDITDDYPNSRNKVVKLSLKPYRFDVYLDNGVYKFVTVKNLDVIKKENYYEVNSKCYEEAKKLKKISNQAEFIASFYNNDLIKINGELYRVIGVNNDLLNRIEVNMIDITYREYLENMNDKRPPHIIKTIASKTQSIKKYSTDILGNLYEVKSKKRPQIIKKG

SEQ ID NO: 62 - protein, 402 aa, synthetic construct
  REGION 1..402: note = Description of Artificial Sequence: Synthetic polypeptide
ATRGLMNLLRSYFRVNNLDVKVKSINGGFTSFLRRKWKFKKERNKGYKHHAEDALIIANADFIFKEWKKLDKAKKLMENQMFEEKQAESMPEIETEQEYKEIFITPHQIKHIKDFKDYKYSHRVDKKPNRELINDTLYSTRKDDKGNTLIVNNLNGLYDKDNDKLKKLINKSPEKLLMYHHDPQTYQKLKLIMEQYGDEKNPLYKYYEETGNYLTKYSKKDNGPVIKKIKYYGNKLNAHLDITDDYPNSRNKVVKLSLKPYRFDVYLDNGVYKFVTVRNLDVIKKENHYEVNSKCYEEAKKLKKISNQAEFIASFYNNDLIKINGELYRVIGVNNDLLNRIEVNMIDITYREYLENMNDKRPPQIIKTIASKTQSIKKYSTDILGNLYEVKSKKHPQIIKKG

SEQ ID NO: 63 - protein, 402 aa, synthetic construct
  REGION 1..402: note = Description of Artificial Sequence: Synthetic polypeptide
ATRGLMNLLRSYFRVNNLDVKVKSINGGFTSFLRRKWKFKKERNKGYKHHAEDALIIANADFIFKEWKKLDKAKKVMENQMFEEKQAESKPEIETEQEYKEIFITPHQIKHIKDFKDYKYSHRVDKKPNRKLINDTLYSTRKDDKGNTLIVNNLNGLYDKDNDKLKKLINKSPEKLLMYHHDPQTYQKLKLIMEQYGDEKNPLYKYYEETGNYLTKYSKKDNGPVIKKIKYYGNKLNAHLDITDDYPNSRNKVVKLSLKPYRFDVYLDNGVYKFVTVKNLDVIKKENYYEVNTKCYEEAKKLKKISNQAEFIASFYNNDLIKINGELYRVIGVNNDLLNRIEVNMIDITYREYLENMNDKRPPQIIKTIASKTQSIKKYSTDILGNLYEVKSKKHPQIVKKG

SEQ ID NO: 64 - protein, 402 aa, synthetic construct
  REGION 1..402: note = Description of Artificial Sequence: Synthetic polypeptide
ATRGLMNLLRSYFRVNNLDVKVKSINGGFTSFLRRKWKFKKERNKGYKHHAEDALIIANADFIFKEWKKLDRAKKVMENQMFEEKQAESMPEIETEQEYKEIFITPHQIKHIKDFKDYKYSHRVDKKPNRELINDTLYSTRKDDKGYTLIVNNLNGLYDKDNDKLKKLINKSPEKLLMYHHDPQTYQKLKLIMEQYGDEKNPLYKYYEETGNYLTKYSKKDNGPVIKKIKYYGNKLNAHLDITDDYPNSRNKVVKLSLKPYRFDVYLDNGVYKFVTVKNLDVIKKENYYEVNSKCYEEAKKLKKISNQAEFIASFYNNDLIKINGELYRVIGVNNDLLNRIEVNMIDITYREYLENMNDKRPPQIIKTITSKTQSIKKYSTDILGNLYEVKSKKQPQIIKKG

SEQ ID NO: 65 - protein, 402 aa, synthetic construct
  REGION 1..402: note = Description of Artificial Sequence: Synthetic polypeptide
ATRGLMNLLRSYFRVNNLDVKVKSINGGFTSFLRRKWKFKKERNKGYKHHAEDALIIANADFIFKEWKKLDKAKKVMENQMFEEKQAESMPEIETEQEYKEIFITPHQIKHIKDFKDYKYSHRVDKKPNRKLINDTLYSTRKDDKGNTLIVNNLNGLYDKDNDKLKKLINKSPEKLLMYHHDPQTYQKLKLILEQYGDEKNPLYKYYEETGNYLTKYSKKDNGPVIKKIKYYGNKLNAHLDITDDYPNSRNKVVKLSLKPYRFDVYLDNGVYKFVTVKNLDVIKKENYYEVNSKCYEEAKKLKKISNQAEFIASFYNNDLIKINGELYRVIGVNNDLLNRIEVNMIDITYREYLENMNDKRPPQIIKTIASKTQSIKKYSTDILGNLYEVKSKKHPQIIKKG

SEQ ID NO: 66 - protein, 402 aa, synthetic construct
  REGION 1..402: note = Description of Artificial Sequence: Synthetic polypeptide
ATRGLMNLLRSYFRVNNLDVKVKSINGGFTSFLRRKWKFKKERNKGYKHHAEDALIIANADFIFKEWKKLDKAKKVMENQMFEEKQAESMPEIETEQEYKEIFITPHQIKHIKDFKDYKYSHRVDKKPNRKLINDTLYSTRKDDKGNTLIVNNLNGLYDKDNDKLKKLINKSPEKLLMYHHDPQTYQKLKLIMEQYGDEKNPLYKYYEETGNYLTKYSKKDNGPVIKKIKYYGNKLNAHLDITDDYPNSRNKVVKLSLKPYRFDVYLDNGIYKFVTVKNMDVIKKENYYEVNSKCYEEAKKLKKISNQAEFIASFYNNDLIKINGELYRVIGVNNDLLNRIEVNMIDITYREYIENMNDKRPPQIIKTIASKTQSIKKYSTDILGNLYEVKSKKHPQIIKKG

SEQ ID NO: 67 - protein, 402 aa, synthetic construct
  REGION 1..402: note = Description of Artificial Sequence: Synthetic polypeptide
ATRGLMNLLRSYFRVNNLDVKVKSINGGFTSFLRRKWKFKKERNKGYKHHAEDALIIANADFIFKEWKKLDKAKKVMENQMFEEKQAESMPEIETEQEYKEIFITPHQIKHIKDFKDYKYSHRVDKKPNRELINDTLYSTRKDDKGNTLIVNNLNGLYDKDNDKLKKLINKSPEKLLMYHHDPQTYQKLKLIMEQYGDEKNPLYKYYEETGNYLTKYSKKDNGPVIKKIKYYGNKLNAHLDITDDYPNSRNKVVKLSLKPYRFDVYLDNGVYKFVTVRNLDVIKKENYYEVNSKCYEEAKKLKKISNQAEFIASFYNNDLIKINGELYRVIGVNNDLLNRIEVNMIDITYREYLENMNDKRPPQIIKTIASKTQSIKKYSTDILGNLYEVKSKKHPQVIKKG

SEQ ID NO: 68 - protein, 400 aa, synthetic construct
  REGION 1..400: note = Description of Artificial Sequence: Synthetic polypeptide
ATRGLMNLLRSYFRVNNLDVKVKSINGGFTSFLRRKWKFKKERNKGYKHHAEDALIIANADFIFKEWKRLDKAKKVMENQMFEEKQAESMPEIETEQEYKEIFITPHQIKHIKDFKDYKYSHRVDKKPNRELINDTLYSTRKDDKGNTLIVNNLNGLYDKDNDKLKKLINKSPEKLLMYHHDPQTYQKLKLIMEQYGDDKNPLYKYYEETGNYLIKYSKKDNGPVIKKIKYYGNKLNAHLDITDDYPNSRNKVVKLSLKPYRFDVYLDNGVYKFVTVRNLDVIKKENYYEVNSKCYEEAKKLKKISNQAEFIAYFYNNDLIKINGELYRVIGVNNDLLNRIEVNMIDITYREYLENMNDKRPPQIIKTIASKTQSIKKYSTDILGNLYEVKSKKHPQIIK

SEQ ID NO: 69 - protein, 402 aa, synthetic construct
  REGION 1..402: note = Description of Artificial Sequence: Synthetic polypeptide
ATRGLMNLLRSYFRVNNLDVKVKSINGGFTRFLRRKWKFKKERNKGYKHHAEDALIIANADFIFKEWKKLDKAKKVMENQMFEEKQAESMPEIETEQEYKEIFITPHQIKHIKDFKDYKYSHRVDKKPNRKLINDTLYSTRKDDKGNTLIVNNLNGLYDKDNDKLKKLINKSPEKLLMYHHDPQTYQKLKLIMEQYGDEKNPLYKYYEETGNYLTKYSKKDNGPVIKKIKYYGNKLNAHLDITDDYPNSRNKVVKLSLKPYRFDVYLDNGVYKFVTVKNLDVIKKENYYEVNSKCYEEAKKLKKISNQAEFIASFYNNDLIKINGELYRVIGVNNDLLNRIEVNMIDITYREYLENMNDKRPPQIIKTIASKTQSIKKYSTDILGNLYEVKSKKHPQITKKG

SEQ ID NO: 70 - protein, 399 aa, synthetic construct
  REGION 1..399: note = Description of Artificial Sequence: Synthetic polypeptide
ATRGLMNLLRNYFRVNNLDVKVKSINGGFTSFLRRKWKFKKERNKGYKHHAEDALIIANADFIFKEWKKLDKAKKVMENQMFEEKQAESMPEIETEQEYKEIFITPHQIKHIKDFKDYKYSHRVDKKPNRELINDTLYSTRKDDKGNTLIVNNLNGLYDKDNDKLKKLINKSPEKLLMYHHDQQTYQKLKLIMEQYGDEKNPLYKYYEETGNYLTKYSKKDNGPVIKKIKYYGNKLNAHLDITDDYPNSRNKVVKLSLKPYRFDVYLDNGVYKFVTVKNLDVIKNENYYEVNSKCYEEAKKLKKISNQAEFIASFYNNDLIKINGELYRVIGVNNDLLNRIEVNMIDITYREYLENMNDKRPPQNIKTIASKTQSIKKYSTDILGNLYEVKSKKHPQII

SEQ ID NO: 71 - protein, 402 aa, synthetic construct
  REGION 1..402: note = Description of Artificial Sequence: Synthetic polypeptide
ATRGLMNLLRSYFRVNNLDVKVKSINGGFTSFLRRKWKFKKERNKGYKHHAEDALIIANADFIFKEWKKLDKAKKVMENQMFEEKQAESMPEIETEQEYKEIFITPHQIKHIKDFKDYKYSHRVDKKPNRKLINDTLYSTRKDDKGNTLIVNNLNGLYDKDNDKLKKLINKSPEKLLMYHHDPQTYQKLKLIMEQYGDEKNPLYKYYEETGYYLTKYSKKDNGPVIKKIKYYGNKINAHLDITDDYPNSRNKVVKLSLKPYRFDVYLDNGVYKFVTVKNLDVIKKENYYEVNSKCYEEAKKLKKISNQAEFIASFYNNDLIKINGELYRVIGVNNDLLNRIEVNMIDITYREYLENMNDKRPPQIIKTIASKTQSIKKYSTDILGNLYEVKSKKHPQIVKKG

SEQ ID NO: 72 - protein, 402 aa, synthetic construct
  REGION 1..402: note = Description of Artificial Sequence: Synthetic polypeptide
ATRGLMNLLRSYFRVNNLDVKVKSINGGFTSFLRRKWKFKKERNKGYKHHAEDALIIANADFIFKEWKKLDKAKKVMENQMFEEKQAESMPEIETEQEYKEIFITPHQIKHIKDFKDYKYSHRVDKKPNRELINDTLYSTRKDDKGNTLIVNNLNGLYDKDNDKLKKLINKSPEKLLMYHHDPQTYQKLKLIMEQYGDEKNPLYKYYEETGNYLTKYSKKDNGPVIKKIKYYGNKLNAHLDITDDYPNSRNKVVKLSLKPYRFDVYLDNGVYKFVTVKNLDVIKKENYYEVNSKCYEEAKKLKKISNQAEFIASFYNNDLIKINGELYRVIGVNNDLLNRIEVNMIDITYREYLENMNDKRPPQIIKTIASKTQSIKKYSTDILGNLYEVKSKKHPQIIKKG

SEQ ID NO: 73 - protein, 402 aa, synthetic construct
  REGION 1..402: note = Description of Artificial Sequence: Synthetic polypeptide
ATRGLMNLLRSYFRVNNLDVKVKSINGGFTSFLRRKWKFKKERNKGYKHHAEDALIIANADFIFKEWKKLDKAKKVMENQMFEEKQAESMPEIETEQEYKEIFITPHQIKHIKDFKDYKYSHRVDKKPNRELINDTLYSTRKDDKGNTLIVNNLNGLYDKDNDKLKKLINKSPEKLLMYHHDPQTYQKLKLIMEQYGDEKNPLYKYYEETGNYLTKYSKKDNGPVIKKIKYYGNKLNAHLDITDDYPNSRNKVVKLSLKPYRFDVYLDNGVYKFVTVKNLDVIKKENYYEVNSKCYEEAKKLKKISNQAEFIASFYKNDLIKINGELYRVIGVNNDLLNRIEVNMIDITYREYLENMNDKRPPQIIKTIASKTQSIKKYSTDILGNLYEVKSKKHPQIIKKG

SEQ ID NO: 74 - protein, 402 aa, synthetic construct
  REGION 1..402: note = Description of Artificial Sequence: Synthetic polypeptide
ATRGLMNLLRSYFRVNNLDVKVKSINGGFTSFLRRKWKFKKERNKGYKHHAEDALIIANADFIFKEWKKLDKAKKLMENQMFEEKQAESMPEIETEQEYKEIFMTPHQIKHIKDFKDYKYSHRVDKKPNRELINDTLYSTRKDDKGNTLIVNNLNGLYDKDNDKLKKLINKSPEKLLMYHHDPQTYQKLKLIMEQYGDEKNPLYKYHEETGNYLTKYSKKDNGPVIKKIKYYGNKLNAHLDITDDYPNSRNKVVKLSLKPYRFDVYLDNGVYKFVTVKNLDVIKKENYYEVNSKCYEEAKKLKKISNQAEFIASFYNNDLIKINGELYRVIGVNNDLLNRIEVNMIDITYREYLENMNDKRPPHIIKTIASKTQSIKKYSTDILGNLYEVKSKKHPQIIKKG

SEQ ID NO: 75 - protein, 396 aa, synthetic construct
  REGION 1..396: note = Description of Artificial Sequence: Synthetic polypeptide
ATRGLMNLLRSYFRVNNLDVKVKSINGGFTSFLRRKWKFKKERNKGYKHHAEDALIIANADFIFKEWKKLDKAKKVMENQMFEEKQAESMPEIETEQEYKEIFITPHQIKHIKDFKDYKYSHRVDKKPNRELINDTLYSTRKDDKGNTLIVNNLNGLYDKDNDKLKKLINKSPEKLLMYHHDPQTYQKLKLIMEQYGDEKNPLYKYYEETGNYLTKYSKKDIGPVIKKIKYYGNKLNAHLDITDDYPNSRNKVVKLSLKPYRFDVYLDNGVYKFVTVKNLDVIKKENYYEVNSKCYEEAKKLKKISNQAEFIASFYNNDLIKINGELYRVIGVNNDLLNRIEVNMIDITYREYLENMNYKRPPQIIKTIASKTQSIKKYSSDILGNLYEVKSKKHP

SEQ ID NO: 76 - protein, 402 aa, synthetic construct
  REGION 1..402: note = Description of Artificial Sequence: Synthetic polypeptide
ATRGLMNLLRSYFRVNNLDVKVKSINGGFTSFLRRKWKFKKERNKGYKHHAEDALIIANADFIFKEWKKLDKAKKVMENQMFEEKQAESMPEIETEQEYKEIFITPHQIKHIKDFKDYKYSHRVDKKPNRKLINDTLYSTRKDDKGNTLIVNNLNGLYDKDNDKLKKLINKSPEKLLMYHHDPQTYQKLKLIMEQYGDEKNPLYKYYEETGNYLTKYSKKDNGPVIKKIKYYGNKLNAHLDITDDYPNSRNKVVKLSLKPYRFDVYLDNGVYKFVTVKNLDVIKKENYYEVNSKCYEEAKKLKKISNQAEFIASFYNNDLIKINGELYRVIGVNNDLLNRIEVNMIDITYREYLENMNDKRPPQIINTIASKTQSIKKYSTDILGNLYEVKSKKHPQIIKKG

SEQ ID NO: 77 - protein, 402 aa, synthetic construct
  REGION 1..402: note = Description of Artificial Sequence: Synthetic polypeptide
ATRGLMNLLRSYFRVNNLDVKVKSINGGFTSFLRRKWKFKKERNKGYKHHAEDALIIANADFIFKEWKKLDKAKKVMENQMFEEKQAESMPEIETEQEYKELFITPHQIKHIKDFKDYKYSHRVDKKPNRELINDTLYSTRKDDKGNTLIVNNLNGLYDKDNDKLKKLINKSPEKLLMYHHDPQTYQKLKLIMEQYGDEKNPLYKYYEETGNYLTKYSKKDNGPVIKKIKYYGNKLNAHLDITDDYPNSRNKVVKLSLKPYRFDVYLDNGVYKFVTVKNLDVIKKENYYEVNSKCYEEAKKLKKISNQAEFIASFYKNDLIKINGELYRVIGVNNDLLNRIEVNMIDITYREYLENMNDKRPPQIIKTIASKTQSIKKCSTDILGNLYEVKSKKHPQIIKKG

SEQ ID NO: 78 - protein, 402 aa, synthetic construct
  REGION 1..402: note = Description of Artificial Sequence: Synthetic polypeptide
ATRGLMNLLRSYFRVNNLDVKVKSINGGFTSFLRRKWKFKKERNKGYKHHAEDALIIANADFIFKEWKKLDKAKKVMENQMFEKKQAESMPEIETEQEYKEIFITPHQIKHIKDFKDYKYSHRVDKKPNRGLINDTLYSTRKDDKGNTLIVNNLNGLYDKDNDKLKKLINKSPEKLLMYHHDPQTYQKLKLIMEQYGDEKNPLYKYYEDTGNYLTKYSKKDNGPVIKKIKYYGNKLNAHLDITDDYPNSRNKVVKLSLKPYRFDVYLDNGVYKFVTVKNLDLIKKENYYEVNSKCYEEAKKLKKISNQAEFIASFYNNDLIKINGELYRVIGVNNDLLNRIEVNMIDITYREYLENVNDKRPPQIIKTIASKTQSIKKYSTDILGNLYEVKSKKHPQIIKKG

SEQ ID NO: 79 - protein, 402 aa, synthetic construct
  REGION 1..402: note = Description of Artificial Sequence: Synthetic polypeptide
ATRGLMNLLRSYFRVNNLDVKVKSINGGFTSFLRRKWKFKKERNKGYKHHAEDALIIANADFIFKEWKKLDKAKKVMENQMFEEKQAESMPEIETEQEYKEIFITPHQIKHIKDFKDYKYSHRVDKKPNRKLINDTLYSTRKDDKGNTLIVNNLNGLYDKDNDKLKKLINKSPEKLLMYHHDPQTYQKLKLIMEQYGDEKNPLYKYYEETGNYLTKYSKKDNGPVIKKIKYYGNKLNAHLDITDDYPNSRNKVVKLSLKPYRFDVYLDNGIYKFVTVKNLDVIKKENYYEVNSKCYEKAKKLKKISNQAEFIASFYNNDLIKINGELYRVIGVNNDLLNRIEVNMIDITYREYLENMNDKRPPQIIKTIASKTQSIKKYSTDILGNLYEVKSNKHPQIIKKG

SEQ ID NO: 80 - protein, 402 aa, synthetic construct
  REGION 1..402: note = Description of Artificial Sequence: Synthetic polypeptide
ATRGLMNLLRSYFRVNNLDVKVKSINGGFTSFLRRKWKFKKERNKGYKHHAEDALIIANADFIFKEWKKLDKAKKVMENQMFEEKQAESMPEIETEQEYKEIFIIPHQIKHIKDFKDYKYSHRVDKKPNRKLINDTLYSTRKDDKGNTLIVNNLNGLYDKDNDKLKKLINKSPEKLLMYHHDPQTYQKLKLIMEQYGDEKNPLYKYYEETGNYLTKYSKKDNGPVIKKIKYYGNKLNAHLDITDDYPNSRNKVVKLSLKPYRFDVYLDNGVYKFVTVKNLDVIKKENYYEVNSKCYEEAKKLKKISNQAEFIASFYNNDLIKINGELYRVIGVNNDLLNRIEVNMIDITYREYLENMNDKRPPQIIKTIASKTQSIKKYSTDILGNLYEVKSKKHPQIIKKG

SEQ ID NO: 81 - protein, 402 aa, synthetic construct
  REGION 1..402: note = Description of Artificial Sequence: Synthetic polypeptide
ATRGLMNLLRSYFRVNNLDVKVKSINGGFTSFLRRKWKFKKERNKGYKHHAEDALIIANADFIFKEWKKLDKAKKVMENQMFEEKQAESMPEIETQQEYKEIFITPHQIKHIKDFKDYKYSHRVDKKPNRKLINDTLYSTRKDDKGNTLIVNNLNGLYDKDNDKLKKLINKSPEKLLMYHHDPQTYQKLKLIMEQYGDEKNPLYKYYEETGNYLTKYSKKDNGPVIKKIKYYGNKLNAHLDITDDYPNSRNKVVKLSLKPYRFDVYLDNGVYKFVTVKNLDVIKKENYYEVNSKCYEEAKKLKKISNQAEFIASYYNNDLIKINGELYRVIGVNNDLLNRIEVKMIDITYREYLENMNDKRPPQIIKTIASKTQSIKKYSTDILGNLYEVKSKKHPHIIKKG

SEQ ID NO: 82 - protein, 402 aa, synthetic construct
  REGION 1..402: note = Description of Artificial Sequence: Synthetic polypeptide
ATRGLMNLLRSYFRVNNLDVKVKSINGGFTSFLRRKWKFKKERNKGYKHHAEDALIIANADFIFKEWKKLDKAKKVMENQMFEEKQAESMPEIETEQEYKEIFITPHQIKHIKDFKDYKYSHRVDKKPNRKLINDTLYSTRKDDKGNTLIVNILNGLYDKDNDKLKKLINKSPEKLLMYHHDPQTYQKLKLIMEQYGDEKNPLYKYYEETGNYLTKYSKKDNGPVIKKIRYYGNKLNAHLDITDDYPNSRNKVVKLSLKPYRFDVYLDNGVYKFVTVKNLDVIKKENYYEVNSKCYEEAKKLKKISNQAEFIASFYNNDLIKINGELYRVIGVNNDLLNRIEVNMIDITYREYLENMNDKRPPQIIKTIASKTQSIKKYSTDILGNLYEVKSKKHPQIIKKG

SEQ ID NO: 83 - protein, 402 aa, synthetic construct
  REGION 1..402: note = Description of Artificial Sequence: Synthetic polypeptide
ATRGLMNLLRSYFRVNNLDVKVKSINGGFTSFLRRKWKFKKERNKGYKHHAEDALIIANADFIFKEWKKLDKAKKVMENQMFEEKQAESMPEIETEQEYKEIFITPHQIKHIKDFKDYKYSHRVDKKPNRKLINDTLYSTRKDDKGNTLIVNNLNGLYDKDNDKLKKLINKSPEKLLMYHHDPQTYQKLKLIMEQYGDEKNPLYKYYEETGNYLTKYSKKDNGPVIKKIKYYGNKLNAHLDITDDYPNSRNKVVKLSLKPYRFDVYLDNGVYKFVTVKNLDVIKKENYYEVNSKCYEEAKKLKKISNQAEFIASFYNNDLIKINGELYRVIGVNNDLLNRIEVNMIDITYREYFENMNVKRPPQIIKTIASKTQSIKKYSTDILGNLYEVKSKKHPQIIKKG

SEQ ID NO: 84 - protein, 402 aa, synthetic construct
  REGION 1..402: note = Description of Artificial Sequence: Synthetic polypeptide
ATRGLMNLLRSYFRVNNLDVKVKSINGGFTSFLRRKWKFKKERNKGYKHHAEDALIIANADFIFKEWKKLDKAKKVMENQMFEEKQAESMPEIETEQEYKEIFITPHQIKHIKDFKDYKYSHRVDKKHNRELVNDTLYSTRKDDKGNTLIVNNLNGLYDKDNDKLKKLINKSPEKLLMYHHDPQTYQKLKLIMEQYGDEKNPLYKYYEETGNYLTKYSKKDNGPVIKKIKYYGNKLNAHLDITDDYPNSRNKVVKLSLKPYRFDVYLDNGVYKFVTVKNLDVIKKENYYEVNSKCYEEAKKLKKISNQAEFIASFYNNDLIKINGELYRVIGVNNDLLNRIEVNMIDITYREYLENMNDKRPPQIIKTITSKTQSIKKYSTDILGNLYEVKSKKHPQIIKKG

SEQ ID NO: 85 - protein, 402 aa, synthetic construct
  REGION 1..402: note = Description of Artificial Sequence: Synthetic polypeptide
ATRGLMNLLRSYFRVNNLDVKVKSINGGFTSFLRRKWKFKKERNKGYKHHAEDALIIANADFIFKEWKKLDKAKKVMENQMFEEKQAESMPEIETEQEYKEIFITPHQIKHIMDFKDYKYSHRVDKKPNRELINDTLYSTRKDEKGNTLIVNNLNGLYDKDNDKLKKLINKSPEKLLMYHHDPQTYQKLKLIMEQYGDEKNPLYKYYEETGNYLTKYSKKDNGPVIKKIKYYGNKLNAHLDITDDYPNSRNKVVKLSLKPYRFDVYLDNGVYKFVTVRNLDVIKKENYYEVNSKCYEEAKKLKKISNQAEFIASFYNNDLIKINGELYRVIGVNNDLLNRIEVNMIDITYREYLENMNDKRPPQIIKTIASKTQSIKKYSTDILGNLYEVKSKKHPQIIKKG

SEQ ID NO: 86 - protein, 402 aa, synthetic construct
  REGION 1..402: note = Description of Artificial Sequence: Synthetic polypeptide
ATRGLMNLLRSYFRVNNLDVKVKSINGGFTSFLRRKWKFKKERNKGYKHHAEDALIIANADFIFKEWKKLDKAKKVMENQMFEEKQAVSMPEIETEQEYKEIFINPHQIKHIKDFKDYKYSHRVDKKPNRELINDTLYSTRKDDKGNTLIVNNLNGLYDKYNDKLKKLINKSPEKLLMYHHDPQTYQKLKLIMEQYGDEKNPLYKYYEETGNYLTKYSKKDNGPVIKKIKYYGNKLNAHLDITDDYPNSRNKVVKLSRKPYRFDVYLDNGVYKFVTVKNLDVIKKENYYEVNSKCYEEAKKLKKISNQAEFIASFYNNDLIKINGELYRVIGVNNDLLNRIEVNMIDITYREYRENMNDKRPPQIIKTIASKTQSIKKYSTDILGNLYEVKSKKHPQIIKKG

SEQ ID NO: 87 - protein, 402 aa, synthetic construct
  REGION 1..402: note = Description of Artificial Sequence: Synthetic polypeptide
ATRGLMNLLRSYFRVNNLDVKVKSINGGFTSFLRRKWKFKKERNKGYKHHAEDALIIANADFIFKEWKKLDKAKKVMENQMFEEKQAESMPEIETEQEYKEIFITPHQIKHIKDFKDYKYSHRVDKKPNRELINDTLYSTRKDDKGNTLIVNNLNGLYDKDNDKLKKLINKSPEKLLMYHHDPQTYQKLKLIMEQYGDEKNPLYKYYEETGNYLTKYSKKDNGPVIKKIKYYGNKLNAHLDITDDYPNSRNKVVKLSLKPYRFDVYLDNGVYKFVTVKNLDVIKNENYYEVNSKCYEEAKKLKKISNQAEFIASFYNNDLIKINGELYRVIGVNNDLLNRIEVNMIDITYREYLENINGKRPPQIIKTITSKTQSIKKYSTDILGNLYEVKSKKHPQIIKKG

SEQ ID NO: 88 - protein, 402 aa, synthetic construct
  REGION 1..402: note = Description of Artificial Sequence: Synthetic polypeptide
ATRGLMNLLRSYFRVNNLDVKVKSINGGFTSFLRRKWKFKKERNNGYKHHAEDALIIANADFIFKEWKKLDKAKKVMENQMFEEKQAESMPEIETEQEYKEIFITPHQIKHIKEFKDYKYSHRVDKKPNRKLINDTLYSTRKDDKGNTLIVNNLNGLYDKDNDKLKKLINKSPEKLLMYHHDPQTYQKLKLIMEQYGDEKNPLYKYYEETGIYLTKYSKKDNGPVIKKIKYYGNKLNAHLDITDDYPNSRNKVVKLSLKPYRFDVYLDNGVYKFVTVKNLDVIKKENYYEVNSKCYGEAKKLKKISNQAEFIASFYNNDLIKINGELYRVIGVNNDLLNRIEVNMIDITYREYLEIMNDKRPPQIIKTIASKTQSIKKYSTDILGNLYEVKSNKHPQIIKKG

SEQ ID NO: 89 - protein, 402 aa, synthetic construct
  REGION 1..402: note = Description of Artificial Sequence: Synthetic polypeptide
ATRGLMNLLRSYFRVNNLDVKVKSINGGFTSFLRRKWKFKKERNKGYKHHAEDALIIANADFIFKEWKKLDKAKKVMENQMFEEKQAESMPEIETEQEYKVIFITPHQIKHIKDFKDYKYSHRVDKKPNRKLINDTLYSTRKDDKGNTLIVNNLNGLYDKDNDKLKKLINKSPEKLLMYHHDPQTYQKLKLIMEQYGDEKNPLYIYYEETGNYLTKYSKKDNGPVIKKIKYYGNKLNAHLDITDDYPNSRNKVVKLSLKPYRFDVYLDNGVYKFVTVKNLDVIKKENYYEVNSKCYEEAKKLKKISNQAEFIASFYNNDLIKINGELYRVIGVNNDLLNRIEVNMIDITYREYLENMNDKRPPQIIKTIASKTQSIKKYSTDILGNVYEVKSKKHPQIIIKG

SEQ ID NO: 90 - protein, 402 aa, synthetic construct
  REGION 1..402: note = Description of Artificial Sequence: Synthetic polypeptide
ATRGLMNLLRSYFRVNNLDVKVKSINGGFTSFLRRKWKFKKERNKGYKHHAEDALIIANADFIFKEWKKLDKAKKVMENQMFEEKQAESMPEIETGQEYKEIFITPHQIKHIKDFKDYKYSHRVDKKPNRKLINDTLYSTRKDDKGNTLIVNNLNGLYDKDNDKLKKLINKSPEKLLMYHHDPQTYQKLKLIMEQYGDEKNPLYKYYEETGNYLTKYSKKDNGPVIKKIKYYGNKLNAHLDITDDYPNSRNKVVKLSLKPYRFDVYLDNGVYKFVTVKNLDVIKKENYYEVNSKCYEEAKKLKKISNQAEFIASFYNNDLIKINGELYRVIGVNNDLLNRIEVNMIDITYREYLENMNDKRPPQIIKTIASKTQSIKKYSTDILGNLYEVKSKKHPQIIKKG

SEQ ID NO: 91 - protein, 402 aa, synthetic construct
  REGION 1..402: note = Description of Artificial Sequence: Synthetic polypeptide
ATRGLMNLLKSYFRVNNLDVKVKSINGGFTSFLRRKWKFKKERNKGYKHHAEDALIIANADFIFKEWKKLDKSKKVMENQMFEEKQAESMPEIETEQEYKEIFITPHQIKHIKDFKDYKYSHRVDKKHNRKLINDTLYSTRKDDKGNTLIVNNINGLYDKDNDKLKKLINKSPEKLLMYHHDPQTYQKLKLIMEQYGDEKNPLYKYYEETGNYLTKYSKKDNGPVIKKIKYYGNKLNAHLDITDDYPNSRNKVVKLSLKPYRFDVYLDNGVYKFVTVKNLDVIKKENYYEVNSKCYEEAKKLKKISNQAEFIASFYNNDLIKINGELYRVIGVNNDLLNRIEVNTIDITYREYLENMNDKRPPQIIKTIASKTQSIKKYSTDILGNLYEVKPKKHPQIIKKG

SEQ ID NO: 92 - protein, 396 aa, synthetic construct
  REGION 1..396: note = Description of Artificial Sequence: Synthetic polypeptide
ATRGLMNLLRSYFRVNNLDVKVKSINGGFTSFLRRKWKFKKERNKGYKHHAEDALIIANADFIFKEWKKLDKAKKVMENQMFEEKQAESMPEIETEQEYKEIFITPHQIKHIKDFKDYKYSHRVDKKPNRKLINDTLYSTREDDKGNTLIVNNLNGLYDKDNDKLKKLINKSPEKLLMYHHDPQTYQKLKLIMEQYGDEKNPLYKYYEETGNYLTKYSKKDNGPVIKKIKYYGNKLNAHLDISDDYPNSRNKVVKLSLKPYRFDVYLDNGVYKFVTVKNLDVIKKENYYEVNSKCYEEAKKLKKISNQAEFIASFYNNDLIKINGELYRVIGVNNDLLNRIEVNMIYITYREYLENMNDKRPPQIIKTIASKTQSIKKYSTDILGNLYEVKSKKHP

SEQ ID NO: 93 - protein, 402 aa, synthetic construct
  REGION 1..402: note = Description of Artificial Sequence: Synthetic polypeptide
ATRGLMNLLRSYFRVNNLDVKVKSINGGFTSFLRRKWKFKKERNKGYKHHAEDALIIANADFIFKEWKKLDKAKKVMENQMFEEKQAESMPEIETEQEYKEIFITPYQIKHIKDFKDYKYSHRVDKKPNRELINDTLYSTRKDDKGNTLIVNNLNGLYDKDNDKLKKLINKSPEKLLMYHHDPQTYQKLKLIMEQYGDEKNPLYKYYEETGNYLTKYSKKDNGPVIKKIKYYGNKLNAHLDITDDYPNSRNKVVKLSLKPYRFDVYLDNGVYKFVTVRNLDVIKKENYYEVNSKCYEEAKKLKKISNQAEFIASFYNNDLIKINGELYRVIGVNNDLLNRIEVNMIDITYREYLENMNDKRPPQIIKTIASKTQSIKKYSTDILGNLYEVKSKKHPQIIKKG

SEQ ID NO: 94 - protein, 402 aa, synthetic construct
  REGION 1..402: note = Description of Artificial Sequence: Synthetic polypeptide
ATRGLMNLLRSYFRVNNLDVKVKSINGGFTSFLRRKWKFKKERNKGYKHHAEDALIIANADFIFKEWKKLDNAKKVMENQMFEEKRAESMPEIETEQEYKEIFITPHQIKHIKDFKDFKYSHMVDKKPNRKLINDTLYSTRKDDKGNTLIVNNLNGLYDKDNDKLKKLINKSPEKLLIYHHDPQTYQKLKLIMEQYGDEKNPLYKYYEETGNYLTKYSKKDNGPVIKKIKYYGNKLNAHLDITDDYPNSRNKVVKLSLKPYRFDVYLDNGVYKFVTVKNLDVIKKENYYEVNSKCYEEAKKLKKISNQAEFIASFYNNDLIKINGELYRVIGVNNDLLNRIEVNMIDITYREYLENMNDKRPPQIIKTIASKTQSIKKYSTDILGNLYEVKSKKHPQIIKKG

SEQ ID NO: 95 - protein, 396 aa, synthetic construct
  REGION 1..396: note = Description of Artificial Sequence: Synthetic polypeptide
ATRGLMNLLRSYFRVNNLDVKVKSINGGFTSFLRRKWKFKKERNKGYKHHAEDALIIANADFIFKEWIRLDKAKKVMENQMFEEKQAESMPEIETEQEYKEIFITPHQIKHIKDFKDYKYSHRVDKKPNRKLINDTLYSTRKDDKGNTLIVNNLNGLYDKDNDKLKKLINKSPEKLLMYHHDPQTYQKLKLIMEQYGDEKNPLYKYYEETGNYLTKYSKKDNGPVIKKIKYYGNKLNAHLDITDDYPNSRNKVVKLSLKPYRFDVYLDNGVYKFVTVKNLDVIKKENYYEVNSKCYEEAKKLKKISNQAEFIASFYNNDLIKINGELYRVIGVNNDLLNRIEVNMIDITYREYLENMNDKRPPQIIKTIASKTQSIKKYSTDILGNLYEVKSKKHP

SEQ ID NO: 96 - protein, 396 aa, synthetic construct
  REGION 1..396: note = Description of Artificial Sequence: Synthetic polypeptide
ATRGLMNLLRSYFRVNNLDVKVKSINGGFTSFLRRKWKFKKERNKGYKHHAEDALIVANADFIFKEWKKLDKAKKVMENQMFEEKQAESMPEIETEQEYKEIFITPHQIKHIKDFKDYKYSHRVDKKPNRELINDTLYSTRKDDKGNTLIVINLNGLYDKDNDKLKKLINKSPEKLLMYHHDPQTYQKLKLIMEQYGDEKNPLYKYYEETGNYLTKYSKKDNGPVIKKIKYYGNKLNAHLDITDDYPNSRNKVVKLSLKPYRFDVYLDNGVYKFVTVKNLDVIKKENYYEVNSKCYEEAKKLKKISNQAEFIASFYNNDLIKINGELYRVIGVNNDLLNRIEVNMIDITYREYLENMNDKRPPQIIKTIASKTQSIKKYSTDILGNLYEVKSKKHP

SEQ ID NO: 97 - protein, 396 aa, synthetic construct
  REGION 1..396: note = Description of Artificial Sequence: Synthetic polypeptide
ATRGLMNLLRSYFRVNNLDVKVKSINGGFTSFLRRKWKFKKERNKGYKHHAEDALIIANADFIFKEWKKLDKAKKVMENQMFEEKQAESMPEIETEQEYKEIFITPHQIKHIKDFKDYKYSHRVDKKPNRKLINDTLYSTRKDDKGNTLIVNNLNGLYDKDNDKLKKLINKSPEKLLMYHHDPQTYQKLKLIMEQYGDEKNPLYKYYEETGNYLTKYSKKDNGPVIKKIKYYGNKLNAHLDITDDYPNSRNKVVKLSLKPYRFDVYLDNGVYKFVTVKNLDVIKKENYYEVNSKCYEEAKKLKKISNQAEFIASFYNNDLIKINGELYRVIGVNNDLLNRIEVNMIDITYREYLENMNDKRPPQIIKTIASKTQSIKKYSTDILGNLYEVKSKKHP

SEQ ID NO: 98 - protein, 402 aa, synthetic construct
  REGION 1..402: note = Description of Artificial Sequence: Synthetic polypeptide
ATRGLMNLLRSYFRVNNLDVKVKSINGGFTSFLRRKWKFKKERNKGYKHHAEDALIIANADFIFKEWKKLDKAKKVMENQMFEEKQAMSMPEIETEQEYKEIFITPHQIKHIKDFKDYKYSHRVDKKPNRELINDTLYSTRKDDKGNTLIVNNLNGLYDKDNDKLKKLINKSPEKLLMYHHDPQTYQKLKLIMEQYGDEKNPLYKYYEETGNYLTKYSKKDNGPVIKKIKYYGNKLNAHLDITDDYPDSRNKVVKLSLKPYRFDVYLDNGVYKFVTVKNLDVIKKENYYEVNSKCYEEAKKLKKISNQAEFIASFYNNDLIKINGELYRVIGVNNDLLNRIEVNMIDITYREYLENMNDKRPPHIIKTIASKTQSIKKYSTDILGNLYEVKSQKHPQIIKKG

SEQ ID NO: 99 - protein, 402 aa, synthetic construct
  REGION 1..402: note = Description of Artificial Sequence: Synthetic polypeptide
ATRGLMNLLRSYFRVNNLDVKVKSINGGFTSFLRRKWKFKKERNKGYKHHAEDALIIANADFIFKEWKKLDKAKKVMENQMFEEKQAGSMPEIETEQEYKEIFITPHQIKHIKDFKDYKYSHRVDKKPNRKLINDTLYSTRKDDKGNTLIVNNLNRLYDKDNDKLKKLINKSPEKLLMYHHDPQTYQKLKLIMEQYGDEKNPLYKYYEETGNYLTKYSKKDNGPVIKKIKYYGNKLNAHLDITDDYPNSRNKVVKLSLKPYRFDVYLDNGVYKFVTVKNLDVIKKENYYEVNSKCYEEAKKLKKISNQAEFIASFYNNDLIKINGELYRVIGVNNDLLNRIEVNMIDITYREYLESMNDKRPPQIIKTIASKTQTIKKYSTDILGNLYEVKSKKHPQIIKKG

SEQ ID NO: 100 - protein, 402 aa, synthetic construct
  REGION 1..402: note = Description of Artificial Sequence: Synthetic polypeptide
ATRGLMNLLRSYYRVNNLDVKVKSINGGFTSFLRRKWKFKKERNKGYKHHAEDALIIANADFIFKEWKKLDKAKKVMENQMFEEKQAESMPEIETEQEYKEIFITPHQIKHIKDFKDYKYSHRVDKKPNRELINDTLYSTRKDDKGNTLIVNNLNGLYDKDNDKLKKLTNKSPGKLLMYHHDPQTYQKLKLIMEQYGDEKNPLYKYYEETGNYLTKYSKKDNGPVIKKIKYYGNKLNAYLDITDDYPNSRNNVVKLSLKPYRFDVYLDNGVYKFVTVKNLDVIEKENYYEVNSKCYEEAKKLKKISNQAEFIASFYNNDLIKINGELYRVIGVNNDLLNRIEVNMIDITYREYLENMNDKRPPHIIKTIASKTQSIKKYSTDILGNLYEVKSKKHPQIIKKG

SEQ ID NO: 101 - protein, 402 aa, synthetic construct
  REGION 1..402: note = Description of Artificial Sequence: Synthetic polypeptide
ATRGLMNLLRSYFRVNNLDVKVKSINGGFTSFLRRKWKFKKERNKGYKHHAEDALIIANADFIFKEWKKLDKAKKVMENQMFEEKQAESMPEIETEQEYKEIFITPHQIKHIKDFKDYKYSHRVDKKPNRKLINDTLYSTRKDDKGNTLIVNNLNGLYDKDNDKFKKLINKSPEKLLMYHHDPQTYQKLKLIMEQYGDEKNPLYKYYEETGNYLTKYSKKDNGPVIKKIKYYGNKLNAHLDITDDYPNSRNKVVKLSLKPYRFDVYLDNGVYKFVTVKNLDVIKKDNYYEVNSKCYEEAKKLKKISNQAEFIASFYNNDLIKINGELYRVIGVNNDLLNRIEVNMIDITYREYLENMNDKRPPQIIKTIATKTQSIKKYSTDILGNLYEVKSKKHPQIIKKG

SEQ ID NO: 102 - protein, 400 aa, synthetic construct
  REGION 1..400: note = Description of Artificial Sequence: Synthetic polypeptide
ATRGLMNLLRTYFRVNNLDVKVKSINGGFTSFLRRKWKFKKERNKGYKHHAEDALIIANADFIFKEWKKLDKAKKVMENQMFEEKHAESMPEIETEQEYKEIFITPHQIKHIKDFKDYKYSHRVDKKPNRELINDTLYSTRKDDKGNTLIVNNLNGLYDKDNDKLKKLIDKSPEKLLMYHHDPQTYQKLKLIMEQYGDEKNPLYKYYEETGNYLTKYSKKDNGPVIKKIKYYGNKLNAHLDITDDYPNSRNKVVKLSLKPYRFDVYLDNGVYKFVTVKNLDVIKKENYYEVNSKCYEEAKKLKKISNQAEFIASFYNNDLIKINGELYRVIGVNNDLLNRIEVNMIDITYREYLENMNDKRPPQIIKTIASKTQSIKKYSTDILGNLYEVKSKKHPQIIK

SEQ ID NO: 103 - protein, 402 aa, synthetic construct
  REGION 1..402: note = Description of Artificial Sequence: Synthetic polypeptide
ATRGLMNLLRSYFRVNNLDVKVKSINGGFTSFLRRKWKFKKERNKGYKHHAEDALIIANADFIFKEWKKLDKAKKVMENQMFEEKQAESMPEIETEQEYNEIFITPHQIKHIKDFKDYKYSHRVDKKPNRKLINDTLYSTRKDDKGNTLIVNNLNGLYDKDNDKLKKLINKSPEKLLMYHHDPQTYQKLKLIMEQYGDEKNPLYKYYEETGNYLTKYSKKDNGPVIKKIKYYGNKLNAHLDITDDYPNSRNKVVKLSLKPYRFDVYLDNGVYKFVTVKNLYVIKKENYYEVNSKCYEEAKKLKKISNQAEFIASFYNNDLIKINGELYRVIGVNNDLLNRIEVNMIDITYREYLENMNDKRPPQIIKTIASKTQSIKKYSTDILGNLYEVKSKKHPQIIKKG

SEQ ID NO: 104 - protein, 402 aa, synthetic construct
  REGION 1..402: note = Description of Artificial Sequence: Synthetic polypeptide
ATRGLMNLLRSYFRVNNLDVKVKSINGGFTSFLRRKWKFKKERNKGYKHHAEDALIIANADFIFKEWKKLDKAKKVMENQMFEEKQAESMPEIETEQEYKEIFITPHQIKHIKDFKDYKYSHRVDKKPNRKLINDTLYSTRKDDKGNTLIVNNLNGLYDKDNDKLKKLINKSPEKLLMYHHDPQTYQKLKLIMEQYGDEKNPLYKYYEETGNYLTKYSKKDNGPVIKKIKYYGNKLNAHLDITDDYPNSRNKVVKLSLKPYRFDVYLDNGVYKFVTVKNLDVIKKENYYEVNSKCYEEAKKLKKISNQAEFIASFYNNDLIKINGELYRVIGVNNDLLNRIEVNMIDITYREYLENMNDKRPPQIIKTIASKTQSIKKYSTDILGNLYEVKSKKHPQIIKKG

SEQ ID NO: 105 - DNA, 20 bp, synthetic construct
  misc_feature 1..20: note = Description of Artificial Sequence: Synthetic oligonucleotide
  source 1..20: mol_type = other DNA
gggcacgggcagcttgcccg

SEQ ID NO: 106 - DNA, 20 bp, synthetic construct
  misc_feature 1..20: note = Description of Artificial Sequence: Synthetic oligonucleotide
  source 1..20: mol_type = other DNA
gtcgccctcgaacttcacct

SEQ ID NO: 107 - DNA, 70 bp, synthetic construct
  misc_feature 1..70: note = Description of Artificial Sequence: Synthetic oligonucleotide
  source 1..70: mol_type = other DNA
cgtaaggagcgcgaggcggcggccgcggcggcggaggctgcaggactgagcgagcagatcgtgtttgagg

SEQ ID NO: 108 - DNA, 29 bp, synthetic construct
  misc_feature 1..29: note = Description of Artificial Sequence: Synthetic oligonucleotide
  source 1..29: mol_type = other DNA
cgtaaggagcgagcagatcgtgtttgagg

SEQ ID NO: 109 - DNA, 36 bp, synthetic construct
  misc_feature 1..36: note = Description of Artificial Sequence: Synthetic oligonucleotide
  source 1..36: mol_type = other DNA
cgtaaggagcgcgaggcgagcagatcgtgtttgagg

SEQ ID NO: 110 - DNA, 41 bp, synthetic construct
  misc_feature 1..41: note = Description of Artificial Sequence: Synthetic oligonucleotide
  source 1..41: mol_type = other DNA
cgtaaggagcgcgaggctgagcgagcagatcgtgtttgagg

SEQ ID NO: 111 - DNA, 42 bp, synthetic construct
  misc_feature 1..42: note = Description of Artificial Sequence: Synthetic oligonucleotide
  source 1..42: mol_type = other DNA
cgtaaggagcgcgaggcggcggcgagcagatcgtgtttgagg

SEQ ID NO: 112 - DNA, 54 bp, synthetic construct
  misc_feature 1..54: note = Description of Artificial Sequence: Synthetic oligonucleotide
  source 1..54: mol_type = other DNA
cgtaaggagcgcgaggcggcggccgcagatcgagcgagcagatcgtgtttgagg

SEQ ID NO: 113 - DNA, 55 bp, synthetic construct
  misc_feature 1..55: note = Description of Artificial Sequence: Synthetic oligonucleotide
  source 1..55: mol_type = other DNA
cgtaaggagcgcgaggcggcggccgcggcggctagcgagcagatcgtgtttgagg

SEQ ID NO: 114 - DNA, 55 bp, synthetic construct
  misc_feature 1..55: note = Description of Artificial Sequence: Synthetic oligonucleotide
  source 1..55: mol_type = other DNA
cgtaaggagcgcgaggcggcggccgcggcggcgggcgagcagatcgtgtttgagg

SEQ ID NO: 115 - DNA, 56 bp, synthetic construct
  misc_feature 1..56: note = Description of Artificial Sequence: Synthetic oligonucleotide
  source 1..56: mol_type = other DNA
cgtaaggagcgcgaggcggcggccgcggcggctgagcgagcagatcgtgtttgagg

SEQ ID NO: 116 - DNA, 51 bp, synthetic construct
  misc_feature 1..51: note = Description of Artificial Sequence: Synthetic oligonucleotide
  source 1..51: mol_type = other DNA
cgtaaggagcgcgaggcagcggccgcggcggcgagcagatcgtgtttgagg

SEQ ID NO: 117 - DNA, 57 bp, synthetic construct
  misc_feature 1..57: note = Description of Artificial Sequence: Synthetic oligonucleotide
  source 1..57: mol_type = other DNA
cgtaaggagcgcagagagcgtaaggagcgcgaggcggcgagcagatcgtgtttgagg

SEQ ID NO: 118 - DNA, 62 bp, synthetic construct
  misc_feature 1..62: note = Description of Artificial Sequence: Synthetic oligonucleotide
  source 1..62: mol_type = other DNA
cgtaaggagcgcgaggcggcggccgcggcggcggaggctgagcgagcagatcgtgtttgagg

SEQ ID NO: 119 - DNA, 69 bp, synthetic construct
  misc_feature 1..69: note = Description of Artificial Sequence: Synthetic oligonucleotide
  source 1..69: mol_type = other DNA
cgtaaggagcgcgaggcggcggccgcggcggcggaggctgcagactgagcgagcagatcgtgtttgagg

SEQ ID NO: 120 - DNA, 70 bp, synthetic construct
  misc_feature 1..70: note = Description of Artificial Sequence: Synthetic oligonucleotide
  source 1..70: mol_type = other DNA
cgtaaggagcgcgaggcggcggccgcggcggcggaggctgagcgagactgagcgagcagatcgtgtttga

SEQ ID NO: 121 - DNA, 70 bp, synthetic construct
  misc_feature 1..70: note = Description of Artificial Sequence: Synthetic oligonucleotide
  source 1..70: mol_type = other DNA
cgtaaggagcgcgaggcggcggccgcggcggcggaggctgcagcgagcagagcgagcagatcgtgtttga

SEQ ID NO: 122 - DNA, 61 bp, synthetic construct
  misc_feature 1..61: note = Description of Artificial Sequence: Synthetic oligonucleotide
  source 1..61: mol_type = other DNA
tgtcgggaacctctccagggatgttacggaggccctcatcctgcaagtgttctctcagatc

SEQ ID NO: 123 - DNA, 49 bp, synthetic construct
  misc_feature 1..49: note = Description of Artificial Sequence: Synthetic oligonucleotide
  source 1..49: mol_type = other DNA
tgtcgggtatgttacggaggccctcatcctgcaagtgttctctcagatc

SEQ ID NO: 124 - DNA, 53 bp, synthetic construct
  misc_feature 1..53: note = Description of Artificial Sequence: Synthetic oligonucleotide
  source 1..53: mol_type = other DNA
tgtcgggaacctctgttacggaggccctcatcctgcaagtgttctctcagatc

SEQ ID NO: 125 - DNA, 56 bp, synthetic construct
  misc_feature 1..56: note = Description of Artificial Sequence: Synthetic oligonucleotide
  source 1..56: mol_type = other DNA
tgtcgggaacctctcctgttacggaggccctcatcctgcaagtgttctctcagatc

SEQ ID NO: 126 - DNA, 57 bp, synthetic construct
  misc_feature 1..57: note = Description of Artificial Sequence: Synthetic oligonucleotide
  source 1..57: mol_type = other DNA
tgtcgggaacctctccatgttacggaggccctcatcctgcaagtgttctctcagatc

SEQ ID NO: 127 - DNA, 60 bp, synthetic construct
  misc_feature 1..60: note = Description of Artificial Sequence: Synthetic oligonucleotide
  source 1..60: mol_type = other DNA
tgtcgggaacctctccgggatgttacggaggcccttatcctgcaagtgttctctcagatc

SEQ ID NO: 128 - DNA, 60 bp, synthetic construct
  misc_feature 1..60: note = Description of Artificial Sequence: Synthetic oligonucleotide
  source 1..60: mol_type = other DNA
tgtcgggaacctctccatgatgttacggaggccctcatcctgcaagtgttctctcagatc

SEQ ID NO: 129 - DNA, 61 bp, synthetic construct
  misc_feature 1..61: note = Description of Artificial Sequence: Synthetic oligonucleotide
  source 1..61: mol_type = other DNA
tgtcgggaacctctccagggacgttacggaggccctcatcctgcaagtgttctctcagatc

SEQ ID NO: 130 - DNA, 61 bp, synthetic construct
  misc_feature 1..61: note = Description of Artificial Sequence: Synthetic oligonucleotide
  source 1..61: mol_type = other DNA
tgtcgggaacctctgaaccggatgttacggaggccctcatcctgcaagtgttctctcagat

SEQ ID NO: 131 - DNA, 61 bp, synthetic construct
  misc_feature 1..61: note = Description of Artificial Sequence: Synthetic oligonucleotide
  source 1..61: mol_type = other DNA
tgtcgggaacctctcgttacggagatgttacggaggccctcatcctgcaagtgttctctca

SEQ ID NO: 132 - DNA, 61 bp, synthetic construct
  misc_feature 1..61: note = Description of Artificial Sequence: Synthetic oligonucleotide
  source 1..61: mol_type = other DNA
tgtcgggaacctctccatgttacggatgttacggaggccctcatcctgcaagtgttctctc

SEQ ID NO: 133 - DNA, 61 bp, synthetic construct
  misc_feature 1..61: note = Description of Artificial Sequence: Synthetic oligonucleotide
  source 1..61: mol_type = other DNA
tgtcgggaacctctccatgttgtggatgttacggaggccctcatcctgcaagtgttctctc

SEQ ID NO: 134 - DNA, 61 bp, synthetic construct
  misc_feature 1..61: note = Description of Artificial Sequence: Synthetic oligonucleotide
  source 1..61: mol_type = other DNA
tgtcgggaacctctccatttgagagggaattatttataaaataaataattacggaggccct

SEQ ID NO: 135 - DNA, 61 bp, synthetic construct
  misc_feature 1..61: note = Description of Artificial Sequence: Synthetic oligonucleotide
  source 1..61: mol_type = other DNA
catggcgaccgggggcggaactactgctctccaaccagaggcgagaatcggggggcggacg

SEQ ID NO: 136 - DNA, 55 bp, synthetic construct
  misc_feature 1..55: note = Description of Artificial Sequence: Synthetic oligonucleotide
  source 1..55: mol_type = other DNA
catggcgaccgggggcggaactactgcaccagaggcgagaatcggggggcggacg

SEQ ID NO: 137 - DNA, 56 bp, synthetic construct
  misc_feature 1..56: note = Description of Artificial Sequence: Synthetic oligonucleotide
  source 1..56: mol_type = other DNA
catggcgaccgggggcggaactactgctctcagaggcgagaatcggggggcggacg

SEQ ID NO: 138 - DNA, 57 bp, synthetic construct
  misc_feature 1..57: note = Description of Artificial Sequence: Synthetic oligonucleotide
  source 1..57: mol_type = other DNA
catggcgaccgggggcggaactactgctctccagaggcgagaatcggggggcggacg

SEQ ID NO: 139 - DNA, 57 bp, synthetic construct
  misc_feature 1..57: note = Description of Artificial Sequence: Synthetic oligonucleotide
  source 1..57: mol_type = other DNA
catggcgaccgggggcggaactactgctcgccagaggcgagaatcggggggcggacg

SEQ ID NO: 140 - DNA, 61 bp, synthetic construct
  misc_feature 1..61: note = Description of Artificial Sequence: Synthetic oligonucleotide
  source 1..61: mol_type = other DNA
catggcgaccgggggcggaactactgctctccagaggccagaggcgagaatcggggggcgg

SEQ ID NO: 141 - DNA, 61 bp, synthetic construct
  misc_feature 1..61: note = Description of Artificial Sequence: Synthetic oligonucleotide
  source 1..61: mol_type = other DNA
catggcgaccgggggcggagctactgctctctactgctctctcaccagaggcgagaatcgg

SEQ ID NO: 142 - DNA, 24 bp, synthetic construct
  misc_feature 1..24: note = Description of Artificial Sequence: Synthetic oligonucleotide
  source 1..24: mol_type = other DNA
gccacgaagcaggccaatggngan

SEQ ID NO: 143 - DNA, 24 bp, synthetic construct
  misc_feature 1..24: note = Description of Artificial Sequence: Synthetic oligonucleotide
  source 1..24: mol_type = other DNA
gaatcccttctgcagcacctngan

SEQ ID NO: 144 - DNA, 24 bp, synthetic construct
  misc_feature 1..24: note = Description of Artificial Sequence: Synthetic oligonucleotide
  source 1..24: mol_type = other DNA
gcggcggctgcacaaccagtngan

SEQ ID NO: 145 - DNA, 24 bp, synthetic construct
  misc_feature 1..24: note = Description of Artificial Sequence: Synthetic oligonucleotide
  source 1..24: mol_type = other DNA
ggttgtgcagccgccgctccngan

SEQ ID NO: 146 - DNA, 24 bp, synthetic construct
  misc_feature 1..24: note = Description of Artificial Sequence: Synthetic oligonucleotide
  source 1..24: mol_type = other DNA
ggtgcattttcaggaggaagngan

SEQ ID NO: 147 - DNA, 24 bp, synthetic construct
  misc_feature 1..24: note = Description of Artificial Sequence: Synthetic oligonucleotide
  source 1..24: mol_type = other DNA
gagatgtagggctagaggggngan

SEQ ID NO: 148 - DNA, 24 bp, synthetic construct
  misc_feature 1..24: note = Description of Artificial Sequence: Synthetic oligonucleotide
  source 1..24: mol_type = other DNA
gcgagcagcgtcttcgagagngan

SEQ ID NO: 149 - DNA, 24 bp, synthetic construct
  misc_feature 1..24: note = Description of Artificial Sequence: Synthetic oligonucleotide
  source 1..24: mol_type = other DNA
gtgcggcaagagcttcagccngan

SEQ ID NO: 150 - DNA, 24 bp, synthetic construct
  misc_feature 1..24: note = Description of Artificial Sequence: Synthetic oligonucleotide
  source 1..24: mol_type = other DNA
gcagaagggattccatgaggngcg

SEQ ID NO: 151 - DNA, 23 bp, synthetic construct
  misc_feature 1..23: note = Description of Artificial Sequence: Synthetic oligonucleotide
  source 1..23: mol_type = other DNA
gaagggattccatgaggtgngcg

SEQ ID NO: 152 - DNA, 23 bp, synthetic construct
  misc_feature 1..23: note = Description of Artificial Sequence: Synthetic oligonucleotide
  source 1..23: mol_type = other DNA
gggtgcattttcaggaggangcg

SEQ ID NO: 153 - DNA, 24 bp, synthetic construct
  misc_feature 1..24: note = Description of Artificial Sequence: Synthetic oligonucleotide
  source 1..24: mol_type = other DNA
gcagacggcagtcactagggngcg

SEQ ID NO: 154 - DNA, 24 bp, synthetic construct
  misc_feature 1..24: note = Description of Artificial Sequence: Synthetic oligonucleotide
  source 1..24: mol_type = other DNA
gctgggtgaatggagcgagcngcg

SEQ ID NO: 155 - DNA, 23 bp, synthetic construct
  misc_feature 1..23: note = Description of Artificial Sequence: Synthetic oligonucleotide
  source 1..23: mol_type = other DNA
gagtccgagcagaagaagaaggg

SEQ ID NO: 156 - DNA, 23 bp, synthetic construct
  misc_feature 1..23: note = Description of Artificial Sequence: Synthetic oligonucleotide
  source 1..23: mol_type = other DNA
gtgcggcaagagcttcagccggg

SEQ ID NO: 157 - DNA, 23 bp, synthetic construct
  misc_feature 1..23: note = Description of Artificial Sequence: Synthetic oligonucleotide
  source 1..23: mol_type = other DNA
ggtgagtgagtgtgtgcgtgtgg

SEQ ID NO: 158 - DNA, 27 bp, synthetic construct
  misc_feature 1..27: note = Description of Artificial Sequence: Synthetic oligonucleotide
  source 1..27: mol_type = other DNA
gcaaccacaaacccacgagggnngrrt

SEQ ID NO: 159 - DNA, 27 bp, synthetic construct
  misc_feature 1..27: note = Description of Artificial Sequence: Synthetic oligonucleotide
  source 1..27: mol_type = other DNA
gggtgagtgagtgtgtgcgtgnngrrt

SEQ ID NO: 160 - DNA, 28 bp, synthetic construct
  misc_feature 1..28: note = Description of Artificial Sequence: Synthetic oligonucleotide
  source 1..28: mol_type = other DNA
gtgtggttccagaaccggaggannnrrt

SEQ ID NO: 161 - DNA, 27 bp, synthetic construct
  misc_feature 1..27: note = Description of Artificial Sequence: Synthetic oligonucleotide
  source 1..27: mol_type = other DNA
gctcagcctgagtgttgaggcnnnrrt

SEQ ID NO: 162 - DNA, 27 bp, synthetic construct
  misc_feature 1..27: note = Description of Artificial Sequence: Synthetic oligonucleotide
  source 1..27: mol_type = other DNA
ggctctccgaggagaaggccannnrrt

SEQ ID NO: 163 - DNA, 28 bp, synthetic construct
  misc_feature 1..28: note = Description of Artificial Sequence: Synthetic oligonucleotide
  source 1..28: mol_type = other DNA
gcgcccactgcaaggcccggcgnnnrrt

SEQ ID NO: 164 - DNA, 27 bp, synthetic construct
  misc_feature 1..27: note = Description of Artificial Sequence: Synthetic oligonucleotide
  source 1..27: mol_type = other DNA
ggggtcccaggtgctgacgtannnrrt

SEQ ID NO: 165 - protein, 483 aa, Streptococcus pyogenes
LLNAKLITQRKFDNLTKAERGGLSELDKAGFIKRQLVETRQITKHVAQILDSRMNTKYDENDKLIREVKVITLKSKLVSDFRKDFQFYKVREINNYHHAHDAYLNAVVGTALIKKYPKLESEFVYGDYKVYDVRKMIAKSEQEIGKATAKYFFYSNIMNFFKTEITLANGEIRKRPLIETNGETGEIVWDKGRDFATVRKVLSMPQVNIVKKTEVQTGGFSKESILPKRNSDKLIARKKDWDPKKYGGFDSPTVAYSVLVVAKVEKGKSKKLKSVKELLGITIMERSSFEKNPIDFLEAKGYKEVKKDLIIKLPKYSLFELENGRKRMLASAGELQKGNELALPSKYVNFLYLASHYEKLKGSPEDNEQKQLFVEQHKHYLDEIIEQISEFSKRVILADANLDKVLSAYNKHRDKPIREQAENIIHLFTLTNLGAPAAFKYFDTTIDRKRYTSTKEVLDATLIHQSITGLYETRIDLSQLGGD

SEQ ID NO: 166 - protein, 460 aa, Streptococcus mutans
LLSAKLITQRKFDNLTKAERGGLTDDDKAGFIKRQLVETRQITKHVARILDERFNTETDENNKKIRQVKIVTLKSNLVSNFRKEFELYKVREINDYHHAHDAYLNAVIGKALLGVYPQLEPEFVYGDYPHFHGHKENKATAKKFFYSNIMNFFKKDDVRTDKNGEIIWKKDEHISNIKKVLSYPQVNIVKKVEEQTGGFSKESILPKGNSDKLIPRKTKKFYWDTKKYGGFDSPIVAYSILVIADIEKGKSKKLKTVKALVGVTIMEKMTFERDPVAFLERKGYRNVQEENIIKLPKYSLFKLENGRKRLLASARELQKGNEIVLPNHLGTLLYHAKNIHKVDEPKHLDYVDKHKDEFKELLDVVSNFSKKYTLAEGNLEKIKELYAQNNGEDLKELASSFINLLTFTAIGAPATFKFFDKNIDRKRYTSTTEILNATLIHQSITGLYETRIDLNKLGGD

SEQ ID NO: 167 - protein, 496 aa, Streptococcus thermophilus
LLKSKLISQRKFDNLTKAERGGLLPEDKAGFIQRQLVETRQITKHVARLLDEKFNNKKDENNRAVRTVKIITLKSTLVSQFRKDFELYKVREINDFHHAHDAYLNAVIASALLKKYPKLEPEFVYGDYPKYNSFRERKSATEKVYFYSNIMNIFKKSISLADGRVIERPLIEVNEETGESVWNKESDLATVRRVLSYPQVNVVKKVEEQNHGLDRGKPKGLFNANLSSKPKPNSNENLVGAKEYLDPKKYGGYAGISNSFAVLVKGTIEKGAKKKITNVLEFQGISILDRINYRKDKLNFLLEKGYKDIELIIELPKYSLFELSDGSRRMLASILSTNNKRGEIHKGNQIFLSQKFVKLLYHAKRISNTINENHRKYVENHKKEFEELFYYILEFNENYVGAKKNGKLLNSAFQSWQNHSIDELCSSFIGPTGSERKGLFELTSRGSAADFEFLGVKIPRYRDYTPSSLLKDATLIHQSVTGLYETRIDLAKLGEG

SEQ ID NO: 168 - protein, 446 aa, Listeria innocua
LYQGNLMSKRKFDYLTKAERGGLTEADKARFIHRQLVETRQITKNVANILHQRFNYEKDDHGNTMKQVRIVTLKSALVSQFRKQFQLYKVRDVNDYHHAHDAYLNGVVANTLLKVYPQLEPEFVYGDYHQFDWFKANKATAKKQFYTNIMLFFAQKDRIIDENGEILWDKKYLDTVKKVMSYRQMNIVKKTEIQKGEFSKATIKPKGNSSKLIPRKTNWDPMKYGGLDSPNMAYAVVIEYAKGKNKLVFEKKIIRVTIMERKAFEKDEKAFLEEQGYRQPKVLAKLPKYTLYECEEGRRRMLASANEAQKGNQQVLPNHLVTLLHHAANCEVSDGKSLDYIESNREMFAELLAHVSEFAKRYTLAEANLNKINQLFEQNKEGDIKAIAQSFVDLMAFNAMGAPASFKFFETTIERKRYNNLKELLNSTIIYQSITGLYESRKRLDD

SEQ ID NO: 169 - protein, 470 aa, unidentified
  source 1..470: note = Trepanoma denticola
LAENHLISKRKLNNLTTDPDKIGKFTAQGFIHRQLVETSQVIRLVANILGNEYGHDGTTIIEVTAKMNHQMRKDFDLIKIRDVNDYHHAMDAYLTAYVGDYLYLRYPKLRSYFVYGDFKKLKDQSLKIRNFNFLHDLTNDEAGDKIVDQETGEIIWDKHESVKQLKKVYHYKFMLVSQEVYTRQDALFNQTIYPASDADKRKLIPIKNNKPVDVYGGYSGNVDAYMAIVRIHGKKEDKYKVVGVPMRAVADLKKAESKGRDNYLNAVHEVLKPQFTKKKKDRKTGEITEMMDDFDVLLGKVYYRQLIVDGNKKFMLGSSTYQYNAKQLVLSDKAMQVLSKDDKLKNQDENQNLIDVYDEILEKVDQYFELYDINKFRQKLHDGRKKFIELPVDNDFNGKKLISYGKRATIISILNGLHANATMSNLKYLGISSPFGMLQVPNGIILSPASRICYQSPTGLFERKVKLSDL

SEQ ID NO: 170 - protein, 470 aa, Lactobacillus buchneri
LQRNNFISLEKLNRLTRATPISDDETAKFIARQLVETRQATKVAAKVLEKMFPETKIVYSKAETVSMFRNKFDIVKCREINDFHHAHDAYLNIVVGNVYNTKFTNNPWNFIKEKRDNPKIADTYNYYKVFDYDVKRNNITAWEKGKTIITVKDMLKRNTPIYTRQAACKKGELFNQTIMKKGLGQHPLKKEGPFSNISKYGGYNKVSAAYYTLIEYEEKGNKIRSLETIPLYLVKDIQKDQDVLKSYLTDLLGKKEFKILVPKIKINSLLKINGFPCHITGKTNDSFLLRPAVQFCCSNNEVLYFKKIIRFSEIRSQREKIGKTISPYEDLSFRSYIKENLWKKTKNDEIGEKEFYDLLQKKNLEIYDMLLTKHKDTIYKKRPNSATIDILVKGKEKFKSLIIENQFEVILEILKLFSATRNVSDLQHIGGSKYSGVAKIGNKISSLDNCILIYQSITGIFEKRIDLLKV

SEQ ID NO: 171 - protein, 430 aa, Pasteurella multocida
FVALVLGSQCSAAKKQRLLTQVIDDNKFIDRNLNDTRYIARFLSNYIQENLLLVGKNKKNVFTPNGQITALLRSRWGLIKARENNNRHHALDAIVVACATPSMQQKITRFIRFKEVHPYKIENRYEMVDQESGEIISPHFPEPWAYFRQEVNIRVFDNHPDTVLKEMLPDRPQANHQFVQPLFVSRAPTRKMSGQGHMETIKSAKRLAEGISVLRIPLTQLKPNLLENMVNKEREPALYAGLKARLAEFNQDPAKAFATPFYKQGGQQVKAIRVEQVQKSGVLVRENNGVADNASIVRTDVFIKNNKFFLVPIYTWQVAKGILPNKAIVAHKNEDEWEEMDEGAKFKFSLFPNDLVELKTKKEYFFGYYIGLDRATGNISLKEHDGEISKGKDGVYRVGVKLALSFEKYQVDELGKNRQICRPQQRQPVR

SEQ ID NO: 172 - protein, 448 aa, Neisseria meningitidis
FKARVETSRFPRSKKQRILLQKFDEDGFKERNLNDTRYVNRFLCQFVADRMRLTGKGKKRVFASNGQITNLLRGFWGLRKVRAENDRHHALDAVVVACSTVAMQQKITRFVRYKEMNAFDGKTIDKETGEVLHQKTHFPQPWEFFAQEVMIRVFGKPDGKPEFEEADTPEKLRTLLAEKLSSRPEAVHEYVTPLFVSRAPNRKMSGQGHMETVKSAKRLDEGVSVLRVPLTQLKLKDLEKMVNREREPKLYEALKARLEAHKDDPAKAFAEPFYKYDKAGNRTQQVKAVRVEQVQKTGVWVRNHNGIADNATMVRVDVFEKGDKYYLVPIYSWQVAKGILPDRAVVQGKDEEDWQLIDDSFNFKFSLHPNDLVEVITKKARMFGYFASCHRGTGNINIRIHDLDHKIGKNGILEGIGVKTALSFQKYQIDELGKEIRPCRLKKRPPVR

SEQ ID NO: 173 - protein, 381 aa, Campylobacter jejuni
IEVLAKNLPTKKQKRILDKNYKDKEQKNFKDRNLNDTRYIARLVLNYTKDYLDFLPLSDDENTKLNDTQKGSKVHVEAKSGMLTSALRHTWGFSAKDRNNHLHHAIDAVIIAYANNSIVKAFSDFKKEQESNSAELYAKKISELDYKNKRKFFEPFSGFRQKVLDKIDEIFVSKPERKKPSGALHEETFRKEEEFYQSYGGKEGVLKALELGKIRKVNGKIVKNGDMFRVDIFKHKKTNKFYAVPIYTMDFALKVLPNKAVARSKKGEIKDWILMDENYEFCFSLYKDSLILIQTKDMQEPEFVYYNAFTSSTVSLIVSKHDNKFETLSKNQKILFKNANEKEVIAKSIGIQNLKVFEKYIVSALGEVTKAEFRQREDFKK

SEQ ID NO: 174 - protein, 485 aa, Streptococcus gallolyticus
  REGION 1..485: note = Streptococcus gallolyticus pasteurianus
MKDYVLKQKGLGKKKRDYLLTTENIDKIEVKKKFIERNLVDTRYASRVVLNSLQSALRELGKDTKVSVVRGQFTSQLRRKWKIDKSRETYHHHAVDALIIAASSQLKLWEKQDNPMFVDYGKNQVVDKQTGEILSVSDDEYKELVFQPPYQGFVNTISSKGFEDEILFSYQVDSKYNRKVSDATIYSTRKAKIGKDKKEETYVLGKIKDIYSQNGFDTFIKKYNKDKTQFLMYQKDSLTWENVIEVILRDYPTTKKSEDGKNDVKCNPFEEYRRENGLICKYSKKGKGTPIKSLKYYDKKLGNCIDITPEESRNKVILQSINPWRADVYFNPETLKYELMGLKYSDLSFEKGTGNYHISQEKYDAIKEKEGIGKKSEFKFTLYRNDLILIKDIASGEQEIYRFLSRTMPNVNHYVELKPYDKEKFDNVQELVEALGEADKVGRCIKGLNKPNISIYKVRTDVLGNKYFVKKKGDKPKLDFKNNKK

SEQ ID NO: 175 - protein, 476 aa, Streptococcus thermophilus
LKAFVRESKTLSNKKKEYLLTEEDISKFDVRKKFIERNLVDTRYASRVVLNALQEHFRAHKIDTKVSVVRGQFTSQLRRHWGIEKTRDTYHHHAVDALIIAASSQLNLWKKQKNTLVSYSEDQLLDIETGELISDDEYKESVFKAPYQHFVDTLKSKEFEDSILFSYQVDSKFNRKISDATIYATRQAKVGKDKADETYVLGKIKDIYTQDGYDAFMKIYKKDKSKFLMYRHDPQTFEKVIEPILENYPNKQINEKGKEVPCNPFLKYKEEHGYIRKYSKKGNGPEIKSLKYYDSKLGNHIDITPKDSNNKVVLQSVSPWRADVYFNKTTGKYEILGLKYADLQFEKGTGTYKISQEKYNDIKKKEGVDSDSEFKFTLYKNDLLLVKDTETKEQQLFRFLSRTMPKQKHYVELKPYDKQKFEGGEALIKVLGNVANSGQCKKGLGKSNISIYKVRTDVLGNQHIIKNEGDKPKLDF

SEQ ID NO: 176 - protein, 450 aa, Staphylococcus aureus
FKKHILNLAKGKGRISKTKKEYLLEERDINRFSVQKDFINRNLVDTRYATRGLMNLLRSYFRVNNLDVKVKSINGGFTSFLRRKWKFKKERNKGYKHHAEDALIIANADFIFKEWKKLDKAKKVMENQMFEEKQAESMPEIETEQEYKEIFITPHQIKHIKDFKDYKYSHRVDKKPNRELINDTLYSTRKDDKGNTLIVNNLNGLYDKDNDKLKKLINKSPEKLLMYHHDPQTYQKLKLIMEQYGDEKNPLYKYYEETGNYLTKYSKKDNGPVIKKIKYYGNKLNAHLDITDDYPNSRNKVVKLSLKPYRFDVYLDNGVYKFVTVKNLDVIKKENYYEVNSKCYEEAKKLKKISNQAEFIASFYNNDLIKINGELYRVIGVNNDLLNRIEVNMIDITYREYLENMNDKRPPRIIKTIASKTQSIKKYSTDILGNLYEVKSKKHPQIIKKG

SEQ ID NO: 177-187 - skipped (11 entries)

SEQ ID NO: 188 - protein, 4 aa, synthetic construct
  REGION 1..4: note = Description of Artificial Sequence: Synthetic peptide
GGGS

SEQ ID NO: 189 - protein, 5 aa, synthetic construct
  REGION 1..5: note = Description of Artificial Sequence: Synthetic peptide
GGGGS

SEQ ID NO: 190 - DNA, 33 bp, synthetic construct
  misc_feature 1..33: note = Description of Artificial Sequence: Synthetic oligonucleotide
  source 1..33: mol_type = other DNA
ctagagggcacgggcagcttgccggtgggcatg

SEQ ID NO: 191 - DNA, 25 bp, synthetic construct
  misc_feature 1..25: note = Description of Artificial Sequence: Synthetic oligonucleotide
  source 1..25: mol_type = other DNA
cccaccggcaagctgcccgtgccct

SEQ ID NO: 192 - DNA, 34 bp, synthetic construct
  misc_feature 1..34: note = Description of Artificial Sequence: Synthetic oligonucleotide
  source 1..34: mol_type = other DNA
ctagaggtcgccctcgaacttcacctcgggcatg

SEQ ID NO: 193 - DNA, 26 bp, synthetic construct
  misc_feature 1..26: note = Description of Artificial Sequence: Synthetic oligonucleotide
  source 1..26: mol_type = other DNA
cccgaggtgaagttcgagggcgacct

SEQ ID NO: 194 - DNA, 33 bp, synthetic construct
  misc_feature 1..33: note = Description of Artificial Sequence: Synthetic oligonucleotide
  source 1..33: mol_type = other DNA
aattcgggcacgggcagcttgccggtgggcatg

SEQ ID NO: 195 - DNA, 25 bp, synthetic construct
  misc_feature 1..25: note = Description of Artificial Sequence: Synthetic oligonucleotide
  source 1..25: mol_type = other DNA
cccaccggcaagctgcccgtgcccg

SEQ ID NO: 196 - DNA, 34 bp, synthetic construct
  misc_feature 1..34: note = Description of Artificial Sequence: Synthetic oligonucleotide
  source 1..34: mol_type = other DNA
aattcggtcgccctcgaacttcacctcgggcatg

SEQ ID NO: 197 - DNA, 26 bp, synthetic construct
  misc_feature 1..26: note = Description of Artificial Sequence: Synthetic oligonucleotide
  source 1..26: mol_type = other DNA
cccgaggtgaagttcgagggcgaccg

SEQ ID NO: 198 - DNA, 60 bp, synthetic construct
  misc_feature 1..60: note = Description of Artificial Sequence: Synthetic oligonucleotide
  source 1..60: mol_type = other DNA
gcaggaattcgggcacgggcagcttgccggnnnnnnctnnngcgcaggtcacgaggcatg

SEQ ID NO: 199 - DNA, 60 bp, synthetic construct
  misc_feature 1..60: note = Description of Artificial Sequence: Synthetic oligonucleotide
  source 1..60: mol_type = other DNA
gcaggaattcgtcgccctcgaacttcacctnnnnnnctnnngcgcaggtcacgaggcatg

SEQ ID NO: 200 - DNA, 15 bp, synthetic construct
  misc_feature 1..15: note = Description of Artificial Sequence: Synthetic primer
  source 1..15: mol_type = other DNA
cctcgtgacctgcgc

SEQ ID NO: 201 - DNA, 18 bp, synthetic construct
  misc_feature 1..18: note = Description of Artificial Sequence: Synthetic primer
  source 1..18: mol_type = other DNA
gataccgctcgccgcagc

SEQ ID NO: 202 - DNA, 28 bp, synthetic construct
  misc_feature 1..28: note = Description of Artificial Sequence: Synthetic primer
  source 1..28: mol_type = other DNA
ctgcgttctgatttaatctgtatcaggc

SEQ ID NO: 203 - DNA, 25 bp, synthetic construct
  misc_feature 1..25: note = Description of Artificial Sequence: Synthetic primer
  source 1..25: mol_type = other DNA
ggagatgtaaatcacctccatctga

SEQ ID NO: 204 - DNA, 25 bp, synthetic construct
  misc_feature 1..25: note = Description of Artificial Sequence: Synthetic primer
  source 1..25: mol_type = other DNA
atgttagcctacctcgaaaaccttc

SEQ ID NO: 205 - DNA, 25 bp, synthetic construct
  misc_feature 1..25: note = Description of Artificial Sequence: Synthetic primer
  source 1..25: mol_type = other DNA
cctgtgctctcctgtttttaggtat

SEQ ID NO: 206 - DNA, 25 bp, synthetic construct
  misc_feature 1..25: note = Description of Artificial Sequence: Synthetic primer
  source 1..25: mol_type = other DNA
aacatggtaagaagcgtgagtgttt

SEQ ID NO: 207 - DNA, 25 bp, synthetic construct
  misc_feature 1..25: note = Description of Artificial Sequence: Synthetic primer
  source 1..25: mol_type = other DNA
caggctgttgaaccgtagatttagt

SEQ ID NO: 208 - DNA, 25 bp, synthetic construct
  misc_feature 1..25: note = Description of Artificial Sequence: Synthetic primer
  source 1..25: mol_type = other DNA
tccacatgttttgagtttgagagtc

SEQ ID NO: 209 - DNA, 20 bp, synthetic construct
  misc_feature 1..20: note = Description of Artificial Sequence: Synthetic primer
  source 1..20: mol_type = other DNA
ggagcagctggtcagagggg

SEQ ID NO: 210 - DNA, 22 bp, synthetic construct
  misc_feature 1..22: note = Description of Artificial Sequence: Synthetic primer
  source 1..22: mol_type = other DNA
ccatagggaagggggacactgg

SEQ ID NO: 211 - DNA, 20 bp, synthetic construct
  misc_feature 1..20: note = Description of Artificial Sequence: Synthetic primer
  source 1..20: mol_type = other DNA
gggccgggaaagagttgctg

SEQ ID NO: 212 - DNA, 22 bp, synthetic construct
  misc_feature 1..22: note = Description of Artificial Sequence: Synthetic primer
  source 1..22: mol_type = other DNA
gccctacatctgctctccctcc

SEQ ID NO: 213 - DNA, 25 bp, synthetic construct
  misc_feature 1..25: note = Description of Artificial Sequence: Synthetic primer
  source 1..25: mol_type = other DNA
ccagcacaacttactcgcacttgac

SEQ ID NO: 214 - DNA, 22 bp, synthetic construct
  misc_feature 1..22: note = Description of Artificial Sequence: Synthetic primer
  source 1..22: mol_type = other DNA
catcaccaacccacagccaagg

SEQ ID NO: 215 - DNA, 21 bp, synthetic construct
  misc_feature 1..21: note = Description of Artificial Sequence: Synthetic primer
  source 1..21: mol_type = other DNA
gatgagggctccagatggcac

SEQ ID NO: 216 - DNA, 23 bp, synthetic construct
  misc_feature 1..23: note = Description of Artificial Sequence: Synthetic primer
  source 1..23: mol_type = other DNA
gaggagggagcaggaaagtgagg

SEQ ID NO: 217 - DNA, 20 bp, synthetic construct
  misc_feature 1..20: note = Description of Artificial Sequence: Synthetic oligonucleotide
  source 1..20: mol_type = other DNA
gggcacgggcagcttgccgg

SEQ ID NO: 218 - DNA, 24 bp, synthetic construct
  misc_feature 1..24: note = Description of Artificial Sequence: Synthetic oligonucleotide
  source 1..24: mol_type = other DNA
gggcacgggcagcttgccggtggt

SEQ ID NO: 219 - DNA, 20 bp, synthetic construct
  misc_feature 1..20: note = Description of Artificial Sequence: Synthetic oligonucleotide
  source 1..20: mol_type = other DNA
gtcgccctcgaacttcacct

SEQ ID NO: 220 - DNA, 24 bp, synthetic construct
  misc_feature 1..24: note = Description of Artificial Sequence: Synthetic oligonucleotide
  source 1..24: mol_type = other DNA
gtcgccctcgaacttcacctcggc

SEQ ID NO: 221 - DNA, 20 bp, synthetic construct
  misc_feature 1..20: note = Description of Artificial Sequence: Synthetic oligonucleotide
  source 1..20: mol_type = other DNA
ggtcgccaccatggtgagca

SEQ ID NO: 222 - DNA, 24 bp, synthetic construct
  misc_feature 1..24: note = Description of Artificial Sequence: Synthetic oligonucleotide
  source 1..24: mol_type = other DNA
ggtcgccaccatggtgagcaaggg

SEQ ID NO: 223 - DNA, 20 bp, synthetic construct
  misc_feature 1..20: note = Description of Artificial Sequence: Synthetic oligonucleotide
  source 1..20: mol_type = other DNA
ggtcagggtggtcacgaggg

SEQ ID NO: 224 - DNA, 24 bp, synthetic construct
  misc_feature 1..24: note = Description of Artificial Sequence: Synthetic oligonucleotide
  source 1..24: mol_type = other DNA
ggtcagggtggtcacgagggtggg

SEQ ID NO: 225 - DNA, 20 bp, synthetic construct
  misc_feature 1..20: note = Description of Artificial Sequence: Synthetic oligonucleotide
  source 1..20: mol_type = other DNA
ggtggtgcagatgaacttca

SEQ ID NO: 226 - DNA, 24 bp, synthetic construct
  misc_feature 1..24: note = Description of Artificial Sequence: Synthetic oligonucleotide
  source 1..24: mol_type = other DNA
ggtggtgcagatgaacttcagggt

SEQ ID NO: 227 - DNA, 20 bp, synthetic construct
  misc_feature 1..20: note = Description of Artificial Sequence: Synthetic oligonucleotide
  source 1..20: mol_type = other DNA
gggtggtgcccatcctggtc

SEQ ID NO: 228 - DNA, 24 bp, synthetic construct
  misc_feature 1..24: note = Description of Artificial Sequence: Synthetic oligonucleotide
  source 1..24: mol_type = other DNA
gggtggtgcccatcctggtcgagc

SEQ ID NO: 229 - DNA, 20 bp, synthetic construct
  misc_feature 1..20: note = Description of Artificial Sequence: Synthetic oligonucleotide
  source 1..20: mol_type = other DNA
gacgtaaacggccacaagtt

SEQ ID NO: 230 - DNA, 24 bp, synthetic construct
  misc_feature 1..24: note = Description of Artificial Sequence: Synthetic oligonucleotide
  source 1..24: mol_type = other DNA
gacgtaaacggccacaagttcagc

SEQ ID NO: 231 - DNA, 20 bp, synthetic construct
  misc_feature 1..20: note = Description of Artificial Sequence: Synthetic oligonucleotide
  source 1..20: mol_type = other DNA
gtgcagatgaacttcagggt

SEQ ID NO: 232 - DNA, 24 bp, synthetic construct
  misc_feature 1..24: note = Description of Artificial Sequence: Synthetic oligonucleotide
  source 1..24: mol_type = other DNA
gtgcagatgaacttcagggtcagc

SEQ ID NO: 233 - DNA, 20 bp, synthetic construct
  misc_feature 1..20: note = Description of Artificial Sequence: Synthetic oligonucleotide
  source 1..20: mol_type = other DNA
gggtggtcacgagggtgggc

SEQ ID NO: 234 - DNA, 24 bp, synthetic construct
  misc_feature 1..24: note = Description of Artificial Sequence: Synthetic oligonucleotide
  source 1..24: mol_type = other DNA
gggtggtcacgagggtgggccagg

SEQ ID NO: 235 - DNA, 20 bp, synthetic construct
  misc_feature 1..20: note = Description of Artificial Sequence: Synthetic oligonucleotide
  source 1..20: mol_type = other DNA
ggtcgagctggacggcgacg

SEQ ID NO: 236 - DNA, 24 bp, synthetic construct
  misc_feature 1..24: note = Description of Artificial Sequence: Synthetic oligonucleotide
  source 1..24: mol_type = other DNA
ggtcgagctggacggcgacgtaaa

SEQ ID NO: 237 - DNA, 20 bp, synthetic construct
  misc_feature 1..20: note = Description of Artificial Sequence: Synthetic oligonucleotide
  source 1..20: mol_type = other DNA
gtcgagctggacggcgacgt

SEQ ID NO: 238 - DNA, 24 bp, synthetic construct
  misc_feature 1..24: note = Description of Artificial Sequence: Synthetic oligonucleotide
  source 1..24: mol_type = other DNA
gtcgagctggacggcgacgtaaac

SEQ ID NO: 239 - DNA, 20 bp, synthetic construct
  misc_feature 1..20: note = Description of Artificial Sequence: Synthetic oligonucleotide
  source 1..20: mol_type = other DNA
ggggtggtgcccatcctggt

SEQ ID NO: 240 - DNA, 24 bp, synthetic construct
  misc_feature 1..24: note = Description of Artificial Sequence: Synthetic oligonucleotide
  source 1..24: mol_type = other DNA
ggggtggtgcccatcctggtcgag

SEQ ID NO: 241 - DNA, 20 bp, synthetic construct
  misc_feature 1..20: note = Description of Artificial Sequence: Synthetic oligonucleotide
  source 1..20: mol_type = other DNA
gccaccatggtgagcaaggg

SEQ ID NO: 242 - DNA, 24 bp, synthetic construct
  misc_feature 1..24: note = Description of Artificial Sequence: Synthetic oligonucleotide
  source 1..24: mol_type = other DNA
gccaccatggtgagcaagggcgag

SEQ ID NO: 243 - DNA, 20 bp, synthetic construct
  misc_feature 1..20: note = Description of Artificial Sequence: Synthetic oligonucleotide
  source 1..20: mol_type = other DNA
gtcgccgtccagctcgacca

SEQ ID NO: 244 - DNA, 24 bp, synthetic construct
  misc_feature 1..24: note = Description of Artificial Sequence: Synthetic oligonucleotide
  source 1..24: mol_type = other DNA
gtcgccgtccagctcgaccaggat

SEQ ID NO: 245 - DNA, 20 bp, synthetic construct
  misc_feature 1..20: note = Description of Artificial Sequence: Synthetic oligonucleotide
  source 1..20: mol_type = other DNA
gcatcgccctcgccctcgcc

SEQ ID NO: 246 - DNA, 24 bp, synthetic construct
  misc_feature 1..24: note = Description of Artificial Sequence: Synthetic oligonucleotide
  source 1..24: mol_type = other DNA
gcatcgccctcgccctcgccggac

SEQ ID NO: 247 - DNA, 20 bp, synthetic construct
  misc_feature 1..20: note = Description of Artificial Sequence: Synthetic oligonucleotide
  source 1..20: mol_type = other DNA
gttcgagggcgacaccctgg

SEQ ID NO: 248 - DNA, 24 bp, synthetic construct
  misc_feature 1..24: note = Description of Artificial Sequence: Synthetic oligonucleotide
  source 1..24: mol_type = other DNA
gttcgagggcgacaccctggtgaa

SEQ ID NO: 249 - DNA, 20 bp, synthetic construct
  misc_feature 1..20: note = Description of Artificial Sequence: Synthetic oligonucleotide
  source 1..20: mol_type = other DNA
gttcgagggcgacaccctgg

SEQ ID NO: 250 - DNA, 24 bp, synthetic construct
  misc_feature 1..24: note = Description of Artificial Sequence: Synthetic oligonucleotide
  source 1..24: mol_type = other DNA
gttcgagggcgacaccctggtgaa

SEQ ID NO: 251 - DNA, 20 bp, synthetic construct
  misc_feature 1..20: note = Description of Artificial Sequence: Synthetic oligonucleotide
  source 1..20: mol_type = other DNA
gttcaccagggtgtcgccct

SEQ ID NO: 252 - DNA, 24 bp, synthetic construct
  misc_feature 1..24: note = Description of Artificial Sequence: Synthetic oligonucleotide
  source 1..24: mol_type = other DNA
gttcaccagggtgtcgccctcgaa

SEQ ID NO: 253 - DNA, 20 bp, synthetic construct
  misc_feature 1..20: note = Description of Artificial Sequence: Synthetic oligonucleotide
  source 1..20: mol_type = other DNA
gcagaagaacggcatcaagg

SEQ ID NO: 254 - DNA, 24 bp, synthetic construct
  misc_feature 1..24: note = Description of Artificial Sequence: Synthetic oligonucleotide
  source 1..24: mol_type = other DNA
gcagaagaacggcatcaaggtgaa

SEQ ID NO: 255 - DNA, 17 bp, synthetic construct
  misc_feature 1..17: note = Description of Artificial Sequence: Synthetic oligonucleotide
  source 1..17: mol_type = other DNA
gaagaacggcatcaagg

SEQ ID NO: 256 - DNA, 21 bp, synthetic construct
  misc_feature 1..21: note = Description of Artificial Sequence: Synthetic oligonucleotide
  source 1..21: mol_type = other DNA
gaagaacggcatcaaggtgaa

SEQ ID NO: 257 - DNA, 20 bp, synthetic construct
  misc_feature 1..20: note = Description of Artificial Sequence: Synthetic oligonucleotide
  source 1..20: mol_type = other DNA
gcccaccctcgtgaccaccc

SEQ ID NO: 258 - DNA, 24 bp, synthetic construct
  misc_feature 1..24: note = Description of Artificial Sequence: Synthetic oligonucleotide
  source 1..24: mol_type = other DNA
gcccaccctcgtgaccaccctgac

SEQ ID NO: 259 - DNA, 20 bp, synthetic construct
  misc_feature 1..20: note = Description of Artificial Sequence: Synthetic oligonucleotide
  source 1..20: mol_type = other DNA
gcccttgctcaccatggtgg

SEQ ID NO: 260 - DNA, 24 bp, synthetic construct
  misc_feature 1..24: note = Description of Artificial Sequence: Synthetic oligonucleotide
  source 1..24: mol_type = other DNA
gcccttgctcaccatggtggcgac

SEQ ID NO: 261 - DNA, 20 bp, synthetic construct
  misc_feature 1..20: note = Description of Artificial Sequence: Synthetic oligonucleotide
  source 1..20: mol_type = other DNA
gtcgccgtccagctcgacca

SEQ ID NO: 262 - DNA, 24 bp, synthetic construct
  misc_feature 1..24: note = Description of Artificial Sequence: Synthetic oligonucleotide
  source 1..24: mol_type = other DNA
gtcgccgtccagctcgaccaggat

SEQ ID NO: 263 - DNA, 17 bp, synthetic construct
  misc_feature 1..17: note = Description of Artificial Sequence: Synthetic oligonucleotide
  source 1..17: mol_type = other DNA
gccgtccagctcgacca

SEQ ID NO: 264 - DNA, 21 bp, synthetic construct
  misc_feature 1..21: note = Description of Artificial Sequence: Synthetic oligonucleotide
  source 1..21: mol_type = other DNA
gccgtccagctcgaccaggat

SEQ ID NO: 265 - DNA, 20 bp, synthetic construct
  misc_feature 1..20: note = Description of Artificial Sequence: Synthetic oligonucleotide
  source 1..20: mol_type = other DNA
gtgtccggcgagggcgaggg

SEQ ID NO: 266 - DNA, 24 bp, synthetic construct
  misc_feature 1..24: note = Description of Artificial Sequence: Synthetic oligonucleotide
  source 1..24: mol_type = other DNA
gtgtccggcgagggcgagggcgat

SEQ ID NO: 267 - DNA, 20 bp, synthetic construct
  misc_feature 1..20: note = Description of Artificial Sequence: Synthetic oligonucleotide
  source 1..20: mol_type = other DNA
gggcagcttgccggtggtgc

SEQ ID NO: 268 - DNA, 24 bp, synthetic construct
  misc_feature 1..24: note = Description of Artificial Sequence: Synthetic oligonucleotide
  source 1..24: mol_type = other DNA
gggcagcttgccggtggtgcagat

SEQ ID NO: 269 - DNA, 19 bp, synthetic construct
  misc_feature 1..19: note = Description of Artificial Sequence: Synthetic oligonucleotide
  source 1..19: mol_type = other DNA
ggcagcttgccggtggtgc

SEQ ID NO: 270 - DNA, 23 bp, synthetic construct
  misc_feature 1..23: note = Description of Artificial Sequence: Synthetic oligonucleotide
  source 1..23: mol_type = other DNA
ggcagcttgccggtggtgcagat

SEQ ID NO: 271 - DNA, 18 bp, synthetic construct
  misc_feature 1..18: note = Description of Artificial Sequence: Synthetic oligonucleotide
  source 1..18: mol_type = other DNA
gcagcttgccggtggtgc

SEQ ID NO: 272 - DNA, 22 bp, synthetic construct
  misc_feature 1..22: note = Description of Artificial Sequence: Synthetic oligonucleotide
  source 1..22: mol_type = other DNA
gcagcttgccggtggtgcagat

SEQ ID NO: 273 - DNA, 20 bp, synthetic construct
  misc_feature 1..20: note = Description of Artificial Sequence: Synthetic oligonucleotide
  source 1..20: mol_type = other DNA
ggggtggtgcccatcctggt

SEQ ID NO: 274 - DNA, 24 bp, synthetic construct
  misc_feature 1..24: note = Description of Artificial Sequence: Synthetic oligonucleotide
  source 1..24: mol_type = other DNA
ggggtggtgcccatcctggtcgag

SEQ ID NO: 275 - DNA, 19 bp, synthetic construct
  misc_feature 1..19: note = Description of Artificial Sequence: Synthetic oligonucleotide
  source 1..19: mol_type = other DNA
gggtggtgcccatcctggt

SEQ ID NO: 276 - DNA, 23 bp, synthetic construct
  misc_feature 1..23: note = Description of Artificial Sequence: Synthetic oligonucleotide
  source 1..23: mol_type = other DNA
gggtggtgcccatcctggtcgag

SEQ ID NO: 277 - DNA, 18 bp, synthetic construct
  misc_feature 1..18: note = Description of Artificial Sequence: Synthetic oligonucleotide
  source 1..18: mol_type = other DNA
ggtggtgcccatcctggt

SEQ ID NO: 278 - DNA, 22 bp, synthetic construct
  misc_feature 1..22: note = Description of Artificial Sequence: Synthetic oligonucleotide
  source 1..22: mol_type = other DNA
ggtggtgcccatcctggtcgag

SEQ ID NO: 279 - DNA, 17 bp, synthetic construct
  misc_feature 1..17: note = Description of Artificial Sequence: Synthetic oligonucleotide
  source 1..17: mol_type = other DNA
gtggtgcccatcctggt

SEQ ID NO: 280 - DNA, 21 bp, synthetic construct
  misc_feature 1..21: note = Description of Artificial Sequence: Synthetic oligonucleotide
  source 1..21: mol_type = other DNA
gtggtgcccatcctggtcgag

SEQ ID NO: 281 - DNA, 20 bp, synthetic construct
  misc_feature 1..20: note = Description of Artificial Sequence: Synthetic oligonucleotide
  source 1..20: mol_type = other DNA
gccaccatggtgagcaaggg

SEQ ID NO: 282 - DNA, 24 bp, synthetic construct
  misc_feature 1..24: note = Description of Artificial Sequence: Synthetic oligonucleotide
  source 1..24: mol_type = other DNA
gccaccatggtgagcaagggcgag

SEQ ID NO: 283 - DNA, 20 bp, synthetic construct
  misc_feature 1..20: note = Description of Artificial Sequence: Synthetic oligonucleotide
  source 1..20: mol_type = other DNA
gccgtaggtcagggtggtca

SEQ ID NO: 284 - DNA, 24 bp, synthetic construct
  misc_feature 1..24: note = Description of Artificial Sequence: Synthetic oligonucleotide
  source 1..24: mol_type = other DNA
gccgtaggtcagggtggtcacgag

SEQ ID NO: 285 - DNA, 17 bp, synthetic construct
  misc_feature 1..17: note = Description of Artificial Sequence: Synthetic oligonucleotide
  source 1..17: mol_type = other DNA
gtaggtcagggtggtca

SEQ ID NO: 286 - DNA, 21 bp, synthetic construct
  misc_feature 1..21: note = Description of Artificial Sequence: Synthetic oligonucleotide
  source 1..21: mol_type = other DNA
gtaggtcagggtggtcacgag

SEQ ID NO: 287 - DNA, 20 bp, synthetic construct
  misc_feature 1..20: note = Description of Artificial Sequence: Synthetic oligonucleotide
  source 1..20: mol_type = other DNA
gctgcccgacaaccactacc

SEQ ID NO: 288 - DNA, 24 bp, synthetic construct
  misc_feature 1..24: note = Description of Artificial Sequence: Synthetic oligonucleotide
  source 1..24: mol_type = other DNA
gctgcccgacaaccactacctgag

SEQ ID NO: 289 - DNA, 17 bp, synthetic construct
  misc_feature 1..17: note = Description of Artificial Sequence: Synthetic oligonucleotide
  source 1..17: mol_type = other DNA
gcccgacaaccactacc

SEQ ID NO: 290 - DNA, 21 bp, synthetic construct
  misc_feature 1..21: note = Description of Artificial Sequence: Synthetic oligonucleotide
  source 1..21: mol_type = other DNA
gcccgacaaccactacctgag

SEQ ID NO: 291 - DNA, 20 bp, synthetic construct
  misc_feature 1..20: note = Description of Artificial Sequence: Synthetic oligonucleotide
  source 1..20: mol_type = other DNA
gcgagggcgatgccacctac

SEQ ID NO: 292 - DNA, 24 bp, synthetic construct
  misc_feature 1..24: note = Description of Artificial Sequence: Synthetic oligonucleotide
  source 1..24: mol_type = other DNA
gcgagggcgatgccacctacggca

SEQ ID NO: 293 - DNA, 20 bp, synthetic construct
  misc_feature 1..20: note = Description of Artificial Sequence: Synthetic oligonucleotide
  source 1..20: mol_type = other DNA
gtggtcggggtagcggctga

SEQ ID NO: 294 - DNA, 24 bp, synthetic construct
  misc_feature 1..24: note = Description of Artificial Sequence: Synthetic oligonucleotide
  source 1..24: mol_type = other DNA
gtggtcggggtagcggctgaagca

SEQ ID NO: 295 - DNA, 20 bp, synthetic construct
  misc_feature 1..20: note = Description of Artificial Sequence: Synthetic oligonucleotide
  source 1..20: mol_type = other DNA
ggagctgttcaccggggtgg

SEQ ID NO: 296 - DNA, 24 bp, synthetic construct
  misc_feature 1..24: note = Description of Artificial Sequence: Synthetic oligonucleotide
  source 1..24: mol_type = other DNA
ggagctgttcaccggggtggtgcc

SEQ ID NO: 297 - DNA, 20 bp, synthetic construct
  misc_feature 1..20: note = Description of Artificial Sequence: Synthetic oligonucleotide
  source 1..20: mol_type = other DNA
gaacttgtggccgtttacgt

SEQ ID NO: 298 - DNA, 24 bp, synthetic construct
  misc_feature 1..24: note = Description of Artificial Sequence: Synthetic oligonucleotide
  source 1..24: mol_type = other DNA
gaacttgtggccgtttacgtcgcc

SEQ ID NO: 299 - DNA, 20 bp, synthetic construct
  misc_feature 1..20: note = Description of Artificial Sequence: Synthetic oligonucleotide
  source 1..20: mol_type = other DNA
ggtgaacagctcctcgccct

SEQ ID NO: 300 - DNA, 24 bp, synthetic construct
  misc_feature 1..24: note = Description of Artificial Sequence: Synthetic oligonucleotide
  source 1..24: mol_type = other DNA
ggtgaacagctcctcgcccttgct

SEQ ID NO: 301 - DNA, 20 bp, synthetic construct
  misc_feature 1..20: note = Description of Artificial Sequence: Synthetic oligonucleotide
  source 1..20: mol_type = other DNA
ggtggtgcccatcctggtcg

SEQ ID NO: 302 - DNA, 24 bp, synthetic construct
  misc_feature 1..24: note = Description of Artificial Sequence: Synthetic oligonucleotide
  source 1..24: mol_type = other DNA
ggtggtgcccatcctggtcgagct

SEQ ID NO: 303 - DNA, 20 bp, synthetic construct
  misc_feature 1..20: note = Description of Artificial Sequence: Synthetic oligonucleotide
  source 1..20: mol_type = other DNA
gccacaagttcagcgtgtcc

SEQ ID NO: 304 - DNA, 24 bp, synthetic construct
  misc_feature 1..24: note = Description of Artificial Sequence: Synthetic oligonucleotide
  source 1..24: mol_type = other DNA
gccacaagttcagcgtgtccggcg

SEQ ID NO: 305 - DNA, 20 bp, synthetic construct
  misc_feature 1..20: note = Description of Artificial Sequence: Synthetic oligonucleotide
  source 1..20: mol_type = other DNA
gcgtgtccggcgagggcgag

SEQ ID NO: 306 - DNA, 24 bp, synthetic construct
  misc_feature 1..24: note = Description of Artificial Sequence: Synthetic oligonucleotide
  source 1..24: mol_type = other DNA
gcgtgtccggcgagggcgagggcg

SEQ ID NO: 307 - DNA, 18 bp, synthetic construct
  misc_feature 1..18: note = Description of Artificial Sequence: Synthetic oligonucleotide
  source 1..18: mol_type = other DNA
gtgtccggcgagggcgag

SEQ ID NO: 308 - DNA, 22 bp, synthetic construct
  misc_feature 1..22: note = Description of Artificial Sequence: Synthetic oligonucleotide
  source 1..22: mol_type = other DNA
gtgtccggcgagggcgagggcg

SEQ ID NO: 309 - DNA, 20 bp, synthetic construct
  misc_feature 1..20: note = Description of Artificial Sequence: Synthetic oligonucleotide
  source 1..20: mol_type = other DNA
gcccgaaggctacgtccagg

SEQ ID NO: 310 - DNA, 24 bp, synthetic construct
  misc_feature 1..24: note = Description of Artificial Sequence: Synthetic oligonucleotide
  source 1..24: mol_type = other DNA
gcccgaaggctacgtccaggagcg

SEQ ID NO: 311 - DNA, 20 bp, synthetic construct
  misc_feature 1..20: note = Description of Artificial Sequence: Synthetic oligonucleotide
  source 1..20: mol_type = other DNA
gtcgtccttgaagaagatgg

SEQ ID NO: 312 - DNA, 24 bp, synthetic construct
  misc_feature 1..24: note = Description of Artificial Sequence: Synthetic oligonucleotide
  source 1..24: mol_type = other DNA
gtcgtccttgaagaagatggtgcg

SEQ ID NO: 313 - DNA, 17 bp, synthetic construct
  misc_feature 1..17: note = Description of Artificial Sequence: Synthetic oligonucleotide
  source 1..17: mol_type = other DNA
gtccttgaagaagatgg

SEQ ID NO: 314 - DNA, 21 bp, synthetic construct
  misc_feature 1..21: note = Description of Artificial Sequence: Synthetic oligonucleotide
  source 1..21: mol_type = other DNA
gtccttgaagaagatggtgcg

SEQ ID NO: 315 - DNA, 20 bp, synthetic construct
  misc_feature 1..20: note = Description of Artificial Sequence: Synthetic oligonucleotide
  source 1..20: mol_type = other DNA
ggtcgccaccatggtgagca

SEQ ID NO: 316 - DNA, 24 bp, synthetic construct
  misc_feature 1..24: note = Description of Artificial Sequence: Synthetic oligonucleotide
  source 1..24: mol_type = other DNA
ggtcgccaccatggtgagcaaggg

SEQ ID NO: 317 - DNA, 20 bp, synthetic construct
  misc_feature 1..20: note = Description of Artificial Sequence: Synthetic oligonucleotide
  source 1..20: mol_type = other DNA
ggtggtcacgagggtgggcc

SEQ ID NO: 318 - DNA, 24 bp, synthetic construct
  misc_feature 1..24: note = Description of Artificial Sequence: Synthetic oligonucleotide
  source 1..24: mol_type = other DNA
ggtggtcacgagggtgggccaggg

SEQ ID NO: 319 - DNA, 20 bp, synthetic construct
  misc_feature 1..20: note = Description of Artificial Sequence: Synthetic oligonucleotide
  source 1..20: mol_type = other DNA
gatccaccggtcgccaccat

SEQ ID NO: 320 - DNA, 24 bp, synthetic construct
  misc_feature 1..24: note = Description of Artificial Sequence: Synthetic oligonucleotide
  source 1..24: mol_type = other DNA
gatccaccggtcgccaccatggtg

SEQ ID NO: 321 - DNA, 20 bp, synthetic construct
  misc_feature 1..20: note = Description of Artificial Sequence: Synthetic oligonucleotide
  source 1..20: mol_type = other DNA
gtaaacggccacaagttcag

SEQ ID NO: 322 - DNA, 24 bp, synthetic construct
  misc_feature 1..24: note = Description of Artificial Sequence: Synthetic oligonucleotide
  source 1..24: mol_type = other DNA
gtaaacggccacaagttcagcgtg

SEQ ID NO: 323 - DNA, 20 bp, synthetic construct
  misc_feature 1..20: note = Description of Artificial Sequence: Synthetic oligonucleotide
  source 1..20: mol_type = other DNA
gagtccgagcagaagaagaa

SEQ ID NO: 324 - DNA, 24 bp, synthetic construct
  misc_feature 1..24: note = Description of Artificial Sequence: Synthetic oligonucleotide
  source 1..24: mol_type = other DNA
gagtccgagcagaagaagaagggc

SEQ ID NO: 325 - DNA, 20 bp, synthetic construct
  misc_feature 1..20: note = Description of Artificial Sequence: Synthetic oligonucleotide
  source 1..20: mol_type = other DNA
gtcacctccaatgactaggg

SEQ ID NO: 326 - DNA, 24 bp, synthetic construct
  misc_feature 1..24: note = Description of Artificial Sequence: Synthetic oligonucleotide
  source 1..24: mol_type = other DNA
gtcacctccaatgactagggtggg

SEQ ID NO: 327 - DNA, 20 bp, synthetic construct
  misc_feature 1..20: note = Description of Artificial Sequence: Synthetic oligonucleotide
  source 1..20: mol_type = other DNA
gaggaggaagggcctgagtc

SEQ ID NO: 328 - DNA, 24 bp, synthetic construct
  misc_feature 1..24: note = Description of Artificial Sequence: Synthetic oligonucleotide
  source 1..24: mol_type = other DNA
gaggaggaagggcctgagtccgag

SEQ ID NO: 329 - DNA, 20 bp, synthetic construct
  misc_feature 1..20: note = Description of Artificial Sequence: Synthetic oligonucleotide
  source 1..20: mol_type = other DNA
ggttgcccaccctagtcatt

SEQ ID NO: 330 - DNA, 24 bp, synthetic construct
  misc_feature 1..24: note = Description of Artificial Sequence: Synthetic oligonucleotide
  source 1..24: mol_type = other DNA
ggttgcccaccctagtcattggag

SEQ ID NO: 331 - DNA, 20 bp, synthetic construct
  misc_feature 1..20: note = Description of Artificial Sequence: Synthetic oligonucleotide
  source 1..20: mol_type = other DNA
gctgagctgagagcctgatg

SEQ ID NO: 332 - DNA, 24 bp, synthetic construct
  misc_feature 1..24: note = Description of Artificial Sequence: Synthetic oligonucleotide
  source 1..24: mol_type = other DNA
gctgagctgagagcctgatgggaa

SEQ ID NO: 333 - DNA, 20 bp, synthetic construct
  misc_feature 1..20: note = Description of Artificial Sequence: Synthetic oligonucleotide
  source 1..20: mol_type = other DNA
gccacgaagcaggccaatgg

SEQ ID NO: 334 - DNA, 24 bp, synthetic construct
  misc_feature 1..24: note = Description of Artificial Sequence: Synthetic oligonucleotide
  source 1..24: mol_type = other DNA
gccacgaagcaggccaatggggag

SEQ ID NO: 335 - DNA, 20 bp, synthetic construct
  misc_feature 1..20: note = Description of Artificial Sequence: Synthetic oligonucleotide
  source 1..20: mol_type = other DNA
ggaatcccttctgcagcacc

SEQ ID NO: 336 - DNA, 24 bp, synthetic construct
  misc_feature 1..24: note = Description of Artificial Sequence: Synthetic oligonucleotide
  source 1..24: mol_type = other DNA
ggaatcccttctgcagcacctgga

SEQ ID NO: 337 - DNA, 20 bp, synthetic construct
  misc_feature 1..20: note = Description of Artificial Sequence: Synthetic oligonucleotide
  source 1..20: mol_type = other DNA
gctgcagaagggattccatg

SEQ ID NO: 338 - DNA, 24 bp, synthetic construct
  misc_feature 1..24: note = Description of Artificial Sequence: Synthetic oligonucleotide
  source 1..24: mol_type = other DNA
gctgcagaagggattccatgaggt

SEQ ID NO: 339 - DNA, 20 bp, synthetic construct
  misc_feature 1..20: note = Description of Artificial Sequence: Synthetic oligonucleotide
  source 1..20: mol_type = other DNA
gaatcccttctgcagcacct

SEQ ID NO: 340 - DNA, 24 bp, synthetic construct
  misc_feature 1..24: note = Description of Artificial Sequence: Synthetic oligonucleotide
  source 1..24: mol_type = other DNA
gaatcccttctgcagcacctggat

SEQ ID NO: 341 - DNA, 20 bp, synthetic construct
  misc_feature 1..20: note = Description of Artificial Sequence: Synthetic oligonucleotide
  source 1..20: mol_type = other DNA
gtgctgcagaagggattcca

SEQ ID NO: 342 - DNA, 24 bp, synthetic construct
  misc_feature 1..24: note = Description of Artificial Sequence: Synthetic oligonucleotide
  source 1..24: mol_type = other DNA
gtgctgcagaagggattccatgag

SEQ ID NO: 343 - DNA, 20 bp, synthetic construct
  misc_feature 1..20: note = Description of Artificial Sequence: Synthetic oligonucleotide
  source 1..20: mol_type = other DNA
gcggcggctgcacaaccagt

SEQ ID NO: 344 - DNA, 24 bp, synthetic construct
  misc_feature 1..24: note = Description of Artificial Sequence: Synthetic oligonucleotide
  source 1..24: mol_type = other DNA
gcggcggctgcacaaccagtggag

SEQ ID NO: 345 - DNA, 20 bp, synthetic construct
  misc_feature 1..20: note = Description of Artificial Sequence: Synthetic oligonucleotide
  source 1..20: mol_type = other DNA
ggttgtgcagccgccgctcc

SEQ ID NO: 346 - DNA, 24 bp, synthetic construct
  misc_feature 1..24: note = Description of Artificial Sequence: Synthetic oligonucleotide
  source 1..24: mol_type = other DNA
ggttgtgcagccgccgctccagag

SEQ ID NO: 347 - DNA, 20 bp, synthetic construct
  misc_feature 1..20: note = Description of Artificial Sequence: Synthetic oligonucleotide
  source 1..20: mol_type = other DNA
gaggcaagagggcggctttg

SEQ ID NO: 348 - DNA, 24 bp, synthetic construct
  misc_feature 1..24: note = Description of Artificial Sequence: Synthetic oligonucleotide
  source 1..24: mol_type = other DNA
gaggcaagagggcggctttgggcg

SEQ ID NO: 349 - DNA, 19 bp, synthetic construct
  misc_feature 1..19: note = Description of Artificial Sequence: Synthetic oligonucleotide
  source 1..19: mol_type = other DNA
ggggtccagttccgggatt

SEQ ID NO: 350 - DNA, 23 bp, synthetic construct
  misc_feature 1..23: note = Description of Artificial Sequence: Synthetic oligonucleotide
  source 1..23: mol_type = other DNA
ggggtccagttccgggattagcg

SEQ ID NO: 351 - DNA, 20 bp, synthetic construct
  misc_feature 1..20: note = Description of Artificial Sequence: Synthetic oligonucleotide
  source 1..20: mol_type = other DNA
gcagaagggattccatgagg

SEQ ID NO: 352 - DNA, 24 bp, synthetic construct
  misc_feature 1..24: note = Description of Artificial Sequence: Synthetic oligonucleotide
  source 1..24: mol_type = other DNA
gcagaagggattccatgaggtgcg

SEQ ID NO: 353 - DNA, 19 bp, synthetic construct
  misc_feature 1..19: note = Description of Artificial Sequence: Synthetic oligonucleotide
  source 1..19: mol_type = other DNA
gaagggattccatgaggtg

SEQ ID NO: 354 - DNA, 23 bp, synthetic construct
  misc_feature 1..23: note = Description of Artificial Sequence: Synthetic oligonucleotide
  source 1..23: mol_type = other DNA
gaagggattccatgaggtgcgcg

SEQ ID NO: 355 - DNA, 20 bp, synthetic construct
  misc_feature 1..20: note = Description of Artificial Sequence: Synthetic oligonucleotide
  source 1..20: mol_type = other DNA
gctgaaacagtgacctgtct

SEQ ID NO: 356 - DNA, 24 bp, synthetic construct
  misc_feature 1..24: note = Description of Artificial Sequence: Synthetic oligonucleotide
  source 1..24: mol_type = other DNA
gctgaaacagtgacctgtcttggt

SEQ ID NO: 357 - DNA, 20 bp, synthetic construct
  misc_feature 1..20: note = Description of Artificial Sequence: Synthetic oligonucleotide
  source 1..20: mol_type = other DNA
gatgtagggctagaggggtg

SEQ ID NO: 358 - DNA, 24 bp, synthetic construct
  misc_feature 1..24: note = Description of Artificial Sequence: Synthetic oligonucleotide
  source 1..24: mol_type = other DNA
gatgtagggctagaggggtgaggc

SEQ ID NO: 359 - DNA, 20 bp, synthetic construct
  misc_feature 1..20: note = Description of Artificial Sequence: Synthetic oligonucleotide
  source 1..20: mol_type = other DNA
ggtgcattttcaggaggaag

SEQ ID NO: 360 - DNA, 24 bp, synthetic construct
  misc_feature 1..24: note = Description of Artificial Sequence: Synthetic oligonucleotide
  source 1..24: mol_type = other DNA
ggtgcattttcaggaggaagcgat

SEQ ID NO: 361 - DNA, 20 bp, synthetic construct
  misc_feature 1..20: note = Description of Artificial Sequence: Synthetic oligonucleotide
  source 1..20: mol_type = other DNA
gttttcgctccgaaggtaaa

SEQ ID NO: 362 - DNA, 24 bp, synthetic construct
  misc_feature 1..24: note = Description of Artificial Sequence: Synthetic oligonucleotide
  source 1..24: mol_type = other DNA
gttttcgctccgaaggtaaaagaa

SEQ ID NO: 363 - DNA, 20 bp, synthetic construct
  misc_feature 1..20: note = Description of Artificial Sequence: Synthetic oligonucleotide
  source 1..20: mol_type = other DNA
gagatgtagggctagagggg

SEQ ID NO: 364 - DNA, 24 bp, synthetic construct
  misc_feature 1..24: note = Description of Artificial Sequence: Synthetic oligonucleotide
  source 1..24: mol_type = other DNA
gagatgtagggctagaggggtgag

SEQ ID NO: 365 - DNA, 20 bp, synthetic construct
  misc_feature 1..20: note = Description of Artificial Sequence: Synthetic oligonucleotide
  source 1..20: mol_type = other DNA
gcagaggggagaagaaagag

SEQ ID NO: 366 - DNA, 24 bp, synthetic construct
  misc_feature 1..24: note = Description of Artificial Sequence: Synthetic oligonucleotide
  source 1..24: mol_type = other DNA
gcagaggggagaagaaagagagat

SEQ ID NO: 367 - DNA, 19 bp, synthetic construct
  misc_feature 1..19: note = Description of Artificial Sequence: Synthetic oligonucleotide
  source 1..19: mol_type = other DNA
gggtgcattttcaggagga

SEQ ID NO: 368 - DNA, 23 bp, synthetic construct
  misc_feature 1..23: note = Description of Artificial Sequence: Synthetic oligonucleotide
  source 1..23: mol_type = other DNA
gggtgcattttcaggaggaagcg

SEQ ID NO: 369 - DNA, 20 bp, synthetic construct
  misc_feature 1..20: note = Description of Artificial Sequence: Synthetic oligonucleotide
  source 1..20: mol_type = other DNA
ggtgagtgagtgtgtgcgtg

SEQ ID NO: 370 - DNA, 24 bp, synthetic construct
  misc_feature 1..24: note = Description of Artificial Sequence: Synthetic oligonucleotide
  source 1..24: mol_type = other DNA
ggtgagtgagtgtgtgcgtgtggg

SEQ ID NO: 371 - DNA, 20 bp, synthetic construct
  misc_feature 1..20: note = Description of Artificial Sequence: Synthetic oligonucleotide
  source 1..20: mol_type = other DNA
gttggagcggggagaaggcc

SEQ ID NO: 372 - DNA, 24 bp, synthetic construct
  misc_feature 1..24: note = Description of Artificial Sequence: Synthetic oligonucleotide
  source 1..24: mol_type = other DNA
gttggagcggggagaaggccaggg

SEQ ID NO: 373 - DNA, 20 bp, synthetic construct
  misc_feature 1..20: note = Description of Artificial Sequence: Synthetic oligonucleotide
  source 1..20: mol_type = other DNA
gcgagcagcgtcttcgagag

SEQ ID NO: 374 - DNA, 24 bp, synthetic construct
  misc_feature 1..24: note = Description of Artificial Sequence: Synthetic oligonucleotide
  source 1..24: mol_type = other DNA
gcgagcagcgtcttcgagagtgag

SEQ ID NO: 375 - DNA, 20 bp, synthetic construct
  misc_feature 1..20: note = Description of Artificial Sequence: Synthetic oligonucleotide
  source 1..20: mol_type = other DNA
gacgtgtgtgtctgtgtggg

SEQ ID NO: 376 - DNA, 24 bp, synthetic construct
  misc_feature 1..24: note = Description of Artificial Sequence: Synthetic oligonucleotide
  source 1..24: mol_type = other DNA
gacgtgtgtgtctgtgtgggtgag

SEQ ID NO: 377 - DNA, 20 bp, synthetic construct
  misc_feature 1..20: note = Description of Artificial Sequence: Synthetic oligonucleotide
  source 1..20: mol_type = other DNA
ggttgagggcgttggagcgg

SEQ ID NO: 378 - DNA, 24 bp, synthetic construct
  misc_feature 1..24: note = Description of Artificial Sequence: Synthetic oligonucleotide
  source 1..24: mol_type = other DNA
ggttgagggcgttggagcggggag

SEQ ID NO: 379 - DNA, 20 bp, synthetic construct
  misc_feature 1..20: note = Description of Artificial Sequence: Synthetic oligonucleotide
  source 1..20: mol_type = other DNA
gctttggaaagggggtgggg

SEQ ID NO: 380 - DNA, 24 bp, synthetic construct
  misc_feature 1..24: note = Description of Artificial Sequence: Synthetic oligonucleotide
  source 1..24: mol_type = other DNA
gctttggaaagggggtggggggag

SEQ ID NO: 381 - DNA, 20 bp, synthetic construct
  misc_feature 1..20: note = Description of Artificial Sequence: Synthetic oligonucleotide
  source 1..20: mol_type = other DNA
gcagacggcagtcactaggg

SEQ ID NO: 382 - DNA, 24 bp, synthetic construct
  misc_feature 1..24: note = Description of Artificial Sequence: Synthetic oligonucleotide
  source 1..24: mol_type = other DNA
gcagacggcagtcactagggggcg

SEQ ID NO: 383 - DNA, 20 bp, synthetic construct
  misc_feature 1..20: note = Description of Artificial Sequence: Synthetic oligonucleotide
  source 1..20: mol_type = other DNA
gctgggtgaatggagcgagc

SEQ ID NO: 384 - DNA, 24 bp, synthetic construct
  misc_feature 1..24: note = Description of Artificial Sequence: Synthetic oligonucleotide
  source 1..24: mol_type = other DNA
gctgggtgaatggagcgagcagcg

SEQ ID NO: 385 - DNA, 19 bp, synthetic construct
  misc_feature 1..19: note = Description of Artificial Sequence: Synthetic oligonucleotide
  source 1..19: mol_type = other DNA
gtgtgggtgagtgagtgtg

SEQ ID NO: 386 - DNA, 23 bp, synthetic construct
  misc_feature 1..23: note = Description of Artificial Sequence: Synthetic oligonucleotide
  source 1..23: mol_type = other DNA
gtgtgggtgagtgagtgtgtgcg

SEQ ID NO: 387 - DNA, 19 bp, synthetic construct
  misc_feature 1..19: note = Description of Artificial Sequence: Synthetic oligonucleotide
  source 1..19: mol_type = other DNA
gtgtgcgtgtggggttgag

SEQ ID NO: 388 - DNA, 23 bp, synthetic construct
  misc_feature 1..23: note = Description of Artificial Sequence: Synthetic oligonucleotide
  source 1..23: mol_type = other DNA
gtgtgcgtgtggggttgagggcg

SEQ ID NO: 389 - DNA, 20 bp, synthetic construct
  misc_feature 1..20: note = Description of Artificial Sequence: Synthetic oligonucleotide
  source 1..20: mol_type = other DNA
gtcgtgctgcttcatgtggt

SEQ ID NO: 390 - DNA, 26 bp, synthetic construct
  misc_feature 1..26: note = Description of Artificial Sequence: Synthetic oligonucleotide
  source 1..26: mol_type = other DNA
gtcgtgctgcttcatgtggtcggggt

SEQ ID NO: 391 - DNA, 23 bp, synthetic construct
  misc_feature 1..23: note = Description of Artificial Sequence: Synthetic oligonucleotide
  source 1..23: mol_type = other DNA
gaagtcgtgctgcttcatgtggt

SEQ ID NO: 392 - DNA, 29 bp, synthetic construct
  misc_feature 1..29: note = Description of Artificial Sequence: Synthetic oligonucleotide
  source 1..29: mol_type = other DNA
gaagtcgtgctgcttcatgtggtcggggt

SEQ ID NO: 393 - DNA, 21 bp, synthetic construct
  misc_feature 1..21: note = Description of Artificial Sequence: Synthetic oligonucleotide
  source 1..21: mol_type = other DNA
gccggtggtgcagatgaactt

SEQ ID NO: 394 - DNA, 27 bp, synthetic construct
  misc_feature 1..27: note = Description of Artificial Sequence: Synthetic oligonucleotide
  source 1..27: mol_type = other DNA
gccggtggtgcagatgaacttcagggt

SEQ ID NO: 395 - DNA, 21 bp, synthetic construct
  misc_feature 1..21: note = Description of Artificial Sequence: Synthetic oligonucleotide
  source 1..21: mol_type = other DNA
gccgtaggtcagggtggtcac

SEQ ID NO: 396 - DNA, 27 bp, synthetic construct
  misc_feature 1..27: note = Description of Artificial Sequence: Synthetic oligonucleotide
  source 1..27: mol_type = other DNA
gccgtaggtcagggtggtcacgagggt

SEQ ID NO: 397 - DNA, 21 bp, synthetic construct
  misc_feature 1..21: note = Description of Artificial Sequence: Synthetic oligonucleotide
  source 1..21: mol_type = other DNA
gcaacatcctggggcacaagc

SEQ ID NO: 398 - DNA, 27 bp, synthetic construct
  misc_feature 1..27: note = Description of Artificial Sequence: Synthetic oligonucleotide
  source 1..27: mol_type = other DNA
gcaacatcctggggcacaagctggagt

SEQ ID NO: 399 - DNA, 22 bp, synthetic construct
  misc_feature 1..22: note = Description of Artificial Sequence: Synthetic oligonucleotide
  source 1..22: mol_type = other DNA
ggcaacatcctggggcacaagc

SEQ ID NO: 400 - DNA, 28 bp, synthetic construct
  misc_feature 1..28: note = Description of Artificial Sequence: Synthetic oligonucleotide
  source 1..28: mol_type = other DNA
ggcaacatcctggggcacaagctggagt

SEQ ID NO: 401 - DNA, 21 bp, synthetic construct
  misc_feature 1..21: note = Description of Artificial Sequence: Synthetic oligonucleotide
  source 1..21: mol_type = other DNA
gaagcactgcacgccgtaggt

SEQ ID NO: 402 - DNA, 27 bp, synthetic construct
  misc_feature 1..27: note = Description of Artificial Sequence: Synthetic oligonucleotide
  source 1..27: mol_type = other DNA
gaagcactgcacgccgtaggtcagggt

SEQ ID NO: 403 - DNA, 24 bp, synthetic construct
  misc_feature 1..24: note = Description of Artificial Sequence: Synthetic oligonucleotide
  source 1..24: mol_type = other DNA
gctgaagcactgcacgccgtaggt

SEQ ID NO: 404 - DNA, 30 bp, synthetic construct
  misc_feature 1..30: note = Description of Artificial Sequence: Synthetic oligonucleotide
  source 1..30: mol_type = other DNA
gctgaagcactgcacgccgtaggtcagggt

SEQ ID NO: 405 - DNA, 21 bp, synthetic construct
  misc_feature 1..21: note = Description of Artificial Sequence: Synthetic oligonucleotide
  source 1..21: mol_type = other DNA
gccctcgaacttcacctcggc

SEQ ID NO: 406 - DNA, 27 bp, synthetic construct
  misc_feature 1..27: note = Description of Artificial Sequence: Synthetic oligonucleotide
  source 1..27: mol_type = other DNA
gccctcgaacttcacctcggcgcgggt

SEQ ID NO: 407 - DNA, 24 bp, synthetic construct
  misc_feature 1..24: note = Description of Artificial Sequence: Synthetic oligonucleotide
  source 1..24: mol_type = other DNA
gtcgccctcgaacttcacctcggc

SEQ ID NO: 408 - DNA, 30 bp, synthetic construct
  misc_feature 1..30: note = Description of Artificial Sequence: Synthetic oligonucleotide
  source 1..30: mol_type = other DNA
gtcgccctcgaacttcacctcggcgcgggt

SEQ ID NO: 409 - DNA, 22 bp, synthetic construct
  misc_feature 1..22: note = Description of Artificial Sequence: Synthetic oligonucleotide
  source 1..22: mol_type = other DNA
gcaagggcgaggagctgttcac

SEQ ID NO: 410 - DNA, 28 bp, synthetic construct
  misc_feature 1..28: note = Description of Artificial Sequence: Synthetic oligonucleotide
  source 1..28: mol_type = other DNA
gcaagggcgaggagctgttcaccggggt

SEQ ID NO: 411 - DNA, 24 bp, synthetic construct
  misc_feature 1..24: note = Description of Artificial Sequence: Synthetic oligonucleotide
  source 1..24: mol_type = other DNA
gagcaagggcgaggagctgttcac

SEQ ID NO: 412 - DNA, 30 bp, synthetic construct
  misc_feature 1..30: note = Description of Artificial Sequence: Synthetic oligonucleotide
  source 1..30: mol_type = other DNA
gagcaagggcgaggagctgttcaccggggt

SEQ ID NO: 413 - DNA, 24 bp, synthetic construct
  misc_feature 1..24: note = Description of Artificial Sequence: Synthetic oligonucleotide
  source 1..24: mol_type = other DNA
gcccttcagctcgatgcggttcac

SEQ ID NO: 414 - DNA, 30 bp, synthetic construct
  misc_feature 1..30: note = Description of Artificial Sequence: Synthetic oligonucleotide
  source 1..30: mol_type = other DNA
gcccttcagctcgatgcggttcaccagggt

SEQ ID NO: 415 - DNA, 20 bp, synthetic construct
  misc_feature 1..20: note = Description of Artificial Sequence: Synthetic oligonucleotide
  source 1..20: mol_type = other DNA
gtctatatcatggccgacaa

SEQ ID NO: 416 - DNA, 26 bp, synthetic construct
  misc_feature 1..26: note = Description of Artificial Sequence: Synthetic oligonucleotide
  source 1..26: mol_type = other DNA
gtctatatcatggccgacaagcagaa

SEQ ID NO: 417 - DNA, 21 bp, synthetic construct
  misc_feature 1..21: note = Description of Artificial Sequence: Synthetic oligonucleotide
  source 1..21: mol_type = other DNA
gcagctcgccgaccactacca

SEQ ID NO: 418 - DNA, 27 bp, synthetic construct
  misc_feature 1..27: note = Description of Artificial Sequence: Synthetic oligonucleotide
  source 1..27: mol_type = other DNA
gcagctcgccgaccactaccagcagaa

SEQ ID NO: 419 - DNA, 23 bp, synthetic construct
  misc_feature 1..23: note = Description of Artificial Sequence: Synthetic oligonucleotide
  source 1..23: mol_type = other DNA
gtgcagctcgccgaccactacca

SEQ ID NO: 420 - DNA, 29 bp, synthetic construct
  misc_feature 1..29: note = Description of Artificial Sequence: Synthetic oligonucleotide
  source 1..29: mol_type = other DNA
gtgcagctcgccgaccactaccagcagaa

SEQ ID NO: 421 - DNA, 21 bp, synthetic construct
  misc_feature 1..21: note = Description of Artificial Sequence: Synthetic oligonucleotide
  source 1..21: mol_type = other DNA
gccttcgggcatggcggactt

SEQ ID NO: 422 - DNA, 27 bp, synthetic construct
  misc_feature 1..27: note = Description of Artificial Sequence: Synthetic oligonucleotide
  source 1..27: mol_type = other DNA
gccttcgggcatggcggacttgaagaa

SEQ ID NO: 423 - DNA, 24 bp, synthetic construct
  misc_feature 1..24: note = Description of Artificial Sequence: Synthetic oligonucleotide
  source 1..24: mol_type = other DNA
gtagccttcgggcatggcggactt

SEQ ID NO: 424 - DNA, 30 bp, synthetic construct
  misc_feature 1..30: note = Description of Artificial Sequence: Synthetic oligonucleotide
  source 1..30: mol_type = other DNA
gtagccttcgggcatggcggacttgaagaa

SEQ ID NO: 425 - DNA, 23 bp, synthetic construct
  misc_feature 1..23: note = Description of Artificial Sequence: Synthetic oligonucleotide
  source 1..23: mol_type = other DNA
gtctatatcatggccgacaagca

SEQ ID NO: 426 - DNA, 29 bp, synthetic construct
  misc_feature 1..29: note = Description of Artificial Sequence: Synthetic oligonucleotide
  source 1..29: mol_type = other DNA
gtctatatcatggccgacaagcagaagaa

SEQ ID NO: 427 - DNA, 23 bp, synthetic construct
  misc_feature 1..23: note = Description of Artificial Sequence: Synthetic oligonucleotide
  source 1..23: mol_type = other DNA
gtcttgtagttgccgtcgtcctt

SEQ ID NO: 428 - DNA, 29 bp, synthetic construct
  misc_feature 1..29: note = Description of Artificial Sequence: Synthetic oligonucleotide
  source 1..29: mol_type = other DNA
gtcttgtagttgccgtcgtccttgaagaa

SEQ ID NO: 429 - DNA, 24 bp, synthetic construct
  misc_feature 1..24: note = Description of Artificial Sequence: Synthetic oligonucleotide
  source 1..24: mol_type = other DNA
ggtcttgtagttgccgtcgtcctt

SEQ ID NO: 430 - DNA, 30 bp, synthetic construct
  misc_feature 1..30: note = Description of Artificial Sequence: Synthetic oligonucleotide
  source 1..30: mol_type = other DNA
ggtcttgtagttgccgtcgtccttgaagaa

SEQ ID NO: 431 - protein, 272 aa, synthetic construct
  REGION 1..272: note = Description of Artificial Sequence: Synthetic polypeptide
KTEVQTGGFSKESILPKRNSDKLIARKKDWDPKKYGGFDSPTVAYSVLVVAKVEKGKSKKLKSVKELLGITIMERSSFEKNPIDFLEAKGYKEVKKDLIIKLPKYSLFELENGRKRMLASAGELQKGNELALPSKYVNFLYLASHYEKLKGSPEDNEQKQLFVEQHKHYLDEIIEQISEFSKRVILADANLDKVLSAYNKHRDKPIREQAENIIHLFTLTNLGAPAAFKYFDTTIDRKRYTSTKEVLDATLIHQSITGLYETRIDLSQLGGD

SEQ ID NO: 432 - protein, 272 aa, synthetic construct
  REGION 1..272: note = Description of Artificial Sequence: Synthetic polypeptide
KTEVQTGGFSKESILPKRNSDKLIARKKDWDPKKYGGFYSPTVAYSVLVVAKVEKGKSKKLKSVKELLGITIMERSSFEKNPIDFLEAKGYKEVKKDLIIKLPKYSLFELENGRKRMLASAGELQKGNELALPSKYVNFLYLASHYEKLKGSPEDNEQKQLFVEQHKHYLDEIIEQISEFSKRVILADANLDKVLSAYNKHRDKPIREQAENIIHLFTLTNLGAPAAFKYFDTTIDRKRYISTKEVLDATLIHQSITGLYETRIDLSQLGGD

SEQ ID NO: 433 - protein, 272 aa, synthetic construct
  REGION 1..272: note = Description of Artificial Sequence: Synthetic polypeptide
KTEVQTGGFSKESILPKRNSDKLIARKKDWDPKKYGGFNSPTVAYSVLVVAKVEKGKFKKLKSVKELLGITIMERSSFEKNPIDFLEAKGYKEVKKDLIIKLPKYSLFELENGRKRMLASAGELQKGNELALPSKYVNFLYLASHYEKLKGSPEDNEQKQLFVEQHKHYLDEIIEQISEFSKRVILADANLDKVLSAYNKHRDKPIREQAENIIHLFTLTNLGAPAAFKYFDTTIDRKQYTSTKEVLDATLIHQSITGLYETRIDLSQLGGD

SEQ ID NO: 434 - protein, 272 aa, synthetic construct
  REGION 1..272: note = Description of Artificial Sequence: Synthetic polypeptide
KTEVQTGGFSKESILPKRNSDKLIARKKDWDPKKYGGFYSPTVAYSVLVVAKVEKGKSKKLKSVKELLGITIMERSSFEKNPIDFLEAKGYKEVKKDLIIKLPKYSLFELENGRKRMLASAGELQKGNELALPSKYVNFLYLASHYEKLKGSPEDNEQKQLFVEQHKHYLDEIIEQISEFSKRVILADANLDKVLSAYNKHRDKPIREQAENIIHLFTLTNLGAPAAFKYFDTTIDRKRYTSTKEVLDATLIHQSITGLYETRIDLSQLGGD

SEQ ID NO: 435 - protein, 272 aa, synthetic construct
  REGION 1..272: note = Description of Artificial Sequence: Synthetic polypeptide
KTEVQTGGFSKESILPKRNSDKLIARKKDWDPKKYGGFNSPTVAYSVLVVAKVEKGKSKKLKSVKELLGITIMERSSFEKNPIDFLEAKGYKEVKKDLIIKLPKYSLFELENGRKRMLASAGELQRGNELALPSKYVNFLYLASHYEKLKGSPEDNEQKQLFVEQHKHYLDEIIEQISEFSKRVILADANLDKVLSAYNKHRDKPIREQAENIIHLFTLTNLGAPAAFKYFDTTIDRKRYTSTKEVLDATLIHQSITGLYETRIDLSQLGGD

SEQ ID NO: 436 - protein, 272 aa, synthetic construct
  REGION 1..272: note = Description of Artificial Sequence: Synthetic polypeptide
KTEVQTGGFSKESILPKRNSDKLIARKKDWDPKKYGGFVSPTVAYSVLVVAKVEKGKSKKLKSVKELLGITIMERSSFEKNPIDFLEAKGYKEVKKDLIIKLPKYSLFELENGRKRMLASAGELQKGNELALPSKYVNFLYLASHYEKLKGSPEDNEQKQLFVEQHKHYLDEIIEQISEFSKRVILADANLDKVLSAYNKHRDNPIREQAENIIHLFTLTNLGAPAAFKYFDTTIDRKRYTSTKEVLDATLIHQSITGLYETRIDLSQLGGD

SEQ ID NO: 437 - protein, 272 aa, synthetic construct
  REGION 1..272: note = Description of Artificial Sequence: Synthetic polypeptide
KTEVQTGGFSKESILPKRNSDKLIARKKDWDPKKYGGFDSPTVAYSVLVVAKVEKGKSKKLKSVKELLGITIMERSSFEKNPIDFLEAKGYKEVKKDLIIKLPKYSLFELENGRKRMLASAGELQKGNELALPSKYVNFLYLASHYEKLKGSPEDNEQKQLFVEQHKHYLDEIIEQISEFSKRVILADANLDKVLSAYNKHRDKPIREQAENIIHLFTLTNLGAPAAFKYFDTPIDRKRYTSTKEVLDATLIHQSITGLYETRIDLSQLGGD

SEQ ID NO: 438 - protein, 272 aa, synthetic construct
  REGION 1..272: note = Description of Artificial Sequence: Synthetic polypeptide
KTEVQTGGFSKESILPKRNSDKLIARKKDWDPKKYGGFYSPTVAYSVLVVAKVEKGKSKKLKSVKELLGITIMERSSFEKNPIDFLEAKGYKEVKKDLIIKLPKYSLFELENGRKRMLASAGELQKGNELALPSKYVNFLYLASHYEKLKGSPEDNEQKQLFVEQHKHYLDEIIEQISEFSKRVILADANLDKVLSAYNKHRDKPIREQAENIIHLFTLTNLGAPAAFKYFDTTIDRKQYTSTKEVLDATLIHQSITGLYETRIDLSQLGGD

SEQ ID NO: 439 - protein, 272 aa, synthetic construct
  REGION 1..272: note = Description of Artificial Sequence: Synthetic polypeptide
KTEVQTGGFSKESILPKRNSDKLIARKKDWDPKKYGGFVSPTVAYSVLVVAKVEKGKSKKLKSVKELLGITIMERSSFEKNPIDFLEAKGYKEVKKDLIIKLPKYSLFELENGRKRMLASAGELQKGNELALPSKYVNFLYLASHYEKLKGSPEDNEQKQLFVEQHKHYLDEIIEQISEFSKRVILADANLDKVLSAYNKHRDKPIREQAENIIHLFTLTKLGAPAAIKYFDTTIDRKQYTSTKEVLDATLIHQSITGLYETRIDLSQLGGD

SEQ ID NO: 440 - protein, 272 aa, synthetic construct
  REGION 1..272: note = Description of Artificial Sequence: Synthetic polypeptide
KTEVQTGGFSKESILPKRNSDKLIARKKDWDPKKYGGFYSPTVAYSVLVVAKVEKGKSKKLKSVKELLGITIMERSSFEKNPIDFLEAKGYKEVKKDLIIKLPKYSLFELENGRKRMLASAGELQKGNELALPSKYVNFLYLASHYEKLKGSPEDNEQKQLFVEQHKHYLDEIIEQISEFSKRVILADANLDKVLSAYNKHRDKPIREQAENIIHLFTLTNLGAPAAFKYFDTTIDRKQYTSTKEVLEATLIHQSITGLYETRIDLSQLGGD

SEQ ID NO: 441 - protein, 272 aa, synthetic construct
  REGION 1..272: note = Description of Artificial Sequence: Synthetic polypeptide
KTEVQTGGFSKESILPKRNSDKLIARKKDWDPKKYGGFYSPTVAYSVLVVAKVEKGKSKKLKSVKELLGITIMERSSFEKNPMDFLEAKGYKEVKKDLIIKLPKYSLFELENGRKRMLASAGELQKGNELALPSKYVNFLYLASHYEKLKGSPEDNEQKQLFVEQHKHYLDEIIEQISEFSKRVILADANLDKVLSAYNKHRDKPIREQAENIIHLFTLTNLGAPAAFKYFDTTIDRKQYTSTKEVLDATLIHQSITGLYETRIDLSQLGGD

SEQ ID NO: 442 - protein, 272 aa, synthetic construct
  REGION 1..272: note = Description of Artificial Sequence: Synthetic polypeptide
KTEVQTGGFSKESILPKRNSDKLIARKKDWDPKKYGGFVSPTVAYSVLVEAKVEKGKSKKLKSVKELLGITIMERSSFEKNPIDFLEAKGYKEVKKDLIIKLPKYSLFELENGRKRMLASAGELQKGNELALPSKYVNFLYLASHYEKLKGSPEDNEQKQLFVEQHKHYLDEIIEQISEFSKRVILADANLDKVLSAYNKHRDKPIREQAENIIHLFTLTNLGAPAAFKYFDTTIDRKQYTSTKEVLDATLIHQSITGLYETRIDLSQLGGD

SEQ ID NO: 443 - protein, 272 aa, synthetic construct
  REGION 1..272: note = Description of Artificial Sequence: Synthetic polypeptide
KTEVQTGGFSKESILPKRNSDKLIARKKDWDPKKYGGFESPTVAYSVLVVAKVEKGKSKKLKSVKELLGITIMERSSFEKNPIDFLEAKGYKEVKKDLIIKLPKYSLFELENGRKRMLASAGELQKGNELALPFKYVNFLYLASHYEKLKGSPEDNEQKQLFVEQHKHYLDEIIEQISEFSKRVILADANLDKVLSAYNKHRDKPIREQAENIIHLFTLTNLGAPSAFKYFDTTIDRKQYRSTKEVLDATLIHQSITGLYETRIDLSQLGGD

SEQ ID NO: 444 - protein, 272 aa, synthetic construct
  REGION 1..272: note = Description of Artificial Sequence: Synthetic polypeptide
KTEVQTGGFSKESIFPKRNSDKLIARKKDWDPKKYGGLYSPTVAYSVLVVAKVEKGKSKKLKSVKELLGITIMERSSFEKNPIDFLEAKGYKEIKKDLIIKLPKYSLFELENGRKRMLASAGELQKGNELALPSKYVNFLYLASHYEKLKGSPEDNEQKQLFVEQHKHYLDEIIEQISEFSKRVILADANLDKVLSAYNKHRDKPIREQAENIIHLFTLTNLGAPAAFKYFDTTIDRKQYTSTKEVLDATLIHQSITGLYETRIDLSQLGGD

SEQ ID NO: 445 - protein, 272 aa, synthetic construct
  REGION 1..272: note = Description of Artificial Sequence: Synthetic polypeptide
KTEVQTGGFSKESILPKRNSDKLIARKKDWDPKKYGGFYSPTVAYSVLVVAKVEKGKSKKLKSVKELLGITIMERSSFEKNPIDFLEAKGYKEVKKDLIIKLPKYSLFELENGRKRMLASAGELQKGNELALPSKYVNFLYLASHYEKLKGSPEDKEQKQLFVEQHKHYLDEIIEQISEFSKRVILADANLDKVLSAYNKHRDKPIREQAENIIHLFTLTNLGAPAAFKYFDTTIDRKQYTSTKEVLDATLIHQSITGLYETRIDLSQLGGD

SEQ ID NO: 446 - protein, 272 aa, synthetic construct
  REGION 1..272: note = Description of Artificial Sequence: Synthetic polypeptide
KTEVQTGGFSKESILPKRNSDKLIARKKDWDPKKYGGFYSPTVAYSVLVVAKVEKGKSKKLKSVKELLGITIMERSSFEKNPIDFLEAKGYKEVKEDLIIKLPKYSLFELENGRKRMLASAGELQKGNELALPSKYVNFLYLASHYEKLKGSPEDNEQKQLFVEQHKHYLDEIIEQISEFSKRVILADANLDKVLSAYNKHRDKPICEQAENIIHLFTLTNLGAPAAFKYFDTTIDRKQYTSTKEVLDATLIHQSITGLYETRIDLSQLGGD

SEQ ID NO: 447 - protein, 272 aa, synthetic construct
  REGION 1..272: note = Description of Artificial Sequence: Synthetic polypeptide
KTEVQTGGFSKESILPKRNSDKLIARKKDWDPKKYGGFYSPTVAYSVLVVAKVENRKSKKLKSVKELLGITIMERSSFEKNPIDFLEAKGYKEVKKDLIIKLPKYSLFELENGRKRMLASARELQKGNELALPSKYVNFLYLASHYEKLKGSPEDNEQKQLFVEQHKHYLDEIIEQISEFSKRVILADANLDKVLSAYNKHRDKPIREQAENIIHLFTLTNLGAPAAFKYFDATIDRKQYTSTKEVLDATLIHQSITGLYETRIDLSQLGGD

SEQ ID NO: 448 - protein, 272 aa, synthetic construct
  REGION 1..272: note = Description of Artificial Sequence: Synthetic polypeptide
KTEVQTGGFSKESILPKRNSDKLIARKKDWDPKKYGGFVSPTVAYSVLVVANVEKGKSKKLKSVKELLGITIMERSSFEKNPIDFLEAKGYKEVKKDLIIKLPKYSLFELENGRKRMLASAGELQKGNELALPSKYVNFLYLASHYEKLKGSPEDNEQKQLFVEQHKHYLDEIIEQISEFSKRVILTDANLDKVLSAYNKHRDKPIREQAENIIHLFTLTNLGAPAAFKYFDTTIDRKQYTSTKEVLDATLIHQSITGLYETRIDLSQLGGD

SEQ ID NO: 449 - protein, 272 aa, synthetic construct
  REGION 1..272: note = Description of Artificial Sequence: Synthetic polypeptide
KTEVQTGGFSKESILPKRNSDKLIARKKDWDPKKYGGFYSPTVAYSVLVVAKVEKGKSKKLKSVKELLGITIMERSSFEKNPIDFLEAKGYKEVKKDLIIKLPKYSLFELENGRKRMLASAGELQKGNELALPSKYVNFLYLASHYEKLKGSLEDNEQKQLFVEQHRHYLDEIIEQISEFSKRVILADANLDKVLSAYNKYRDKPIREQAENIIHLFTLTNLGAPAAFKYFDTTIDRKQYTSTKEVLDATLIHQSITGLYETRIDLSQLGGD

SEQ ID NO: 450 - protein, 272 aa, synthetic construct
  REGION 1..272: note = Description of Artificial Sequence: Synthetic polypeptide
KTEVQTGGFSKESILPKRNSDKLIARKKVWDPKKYGGFYSPTVAYSVLVVAKVEKGKSKKLKSVKELLGITIMERSSFEKNPIDFLEAKGYKEVKKDLIIKLPKYSLFELENGRKRMLASAGELQKGNELALPSKYVNFLYLASHYEKLKGSPEDNEQKQLFVEQHKHYLDEIIEQISEFSKRVILADANLDKVLSAYNKHRDKPIREQAENIIHLFTLTNLGAPAAFKYFDTTIDRKQYTSTKEVLDATLIHQSITGLYETRIDLSQLGGD

SEQ ID NO: 451 - protein, 272 aa, synthetic construct
  REGION 1..272: note = Description of Artificial Sequence: Synthetic polypeptide
KTEVQTGGFSKESILPKRNSDKLIARKKDWDPKKYGGFYSPTVAYSILVVAKVEKGKSKKLKSVKELLGITIMERSSFEKNPIDFLEAKGYKEVKKDLIIKLPKYSLFELENGRKRMLASAGELQKGNELALPSKYVNFLYLASHYEKLKGSPEDNEQKQLFVEQHKHYLDEIIEQISEFSKRVILADANLDKVLSAYNKHRDKPIREQAENIIHLFTLTNLGAPAAFKYFDTTIDRKQYTSTKEVLDATLIHQSITGLYETRIDLSQLGGD

SEQ ID NO: 452 - protein, 272 aa, synthetic construct
  REGION 1..272: note = Description of Artificial Sequence: Synthetic polypeptide
KTEVQTGRFSKESILPKRNSDKLIARKKDWDPKKYGGFNSPTVAYSVLVVAKVEKGKSKKLKSVKELLGITIMERSSFEKNPIDFLEAKGYKEVKKDLIIKLPKYSLFELENGRKRMLASAGELQKGNELALPSKYVNFLYLASHYEKLKGSPEDNEQKQLFVEQHKHYLDEIIEQISEFSKRVILADANLDKVLSAYNKHRDKPIREQAENIIHLFTLTNLGAPAAFKYFDTTIDRKQYTSTKEVLDATLIHQSITGLYETRIDLSQLGGD

SEQ ID NO: 453 - protein, 272 aa, synthetic construct
  REGION 1..272: note = Description of Artificial Sequence: Synthetic polypeptide
KTEVQTGGFSKESILPKRNSDKLIARKKDWDPKKYGGFYSPTVAYSVLVVAKVEKGKSKKLKSVKELLGITIMERSSFEKNPIDFLEAKGYKEVKKDLIIKLPKYSLFELENGRKRMLASAGELQKGNELALPSKYVNFLYLASHYEKLKGSPEDNEQKQLFVEQHKHYLDEIIEQISEFSKRVILADANLDKVLSAYNKHRDKPIHEQAENIIHLFTLTNLGAPAAFKYFDTTIDRKQYTSTKEVLDATLIHQSITGLYETRIDLSQLGGD

SEQ ID NO: 454 - protein, 272 aa, synthetic construct; identical to SEQ ID NO: 438
  REGION 1..272: note = Description of Artificial Sequence: Synthetic polypeptide

SEQ ID NO: 455 - protein, 272 aa, synthetic construct
  REGION 1..272: note = Description of Artificial Sequence: Synthetic polypeptide
KTEVQTGGFSKESILPKRNSDKLIARKKDWDPKKYGGFYSPTVAYSVLVVAKVEKGKSKKLKSVKELLGITIMERSSFEKNPIDFLEAKGYKEVKKDLIIKLPKYSLFELENGRKRMLASAGELQKGNELALPSKYVNFLYLASHYEKLKGSPEDNEQKQLFVEQHKHYLDEIIEQISEFSKRVILADANLDKVLSAYNKHRNKPIREQAENIIHLFTLTNLGAPAAFKYFDTMIDRKQYTSTKEVLDATLIHQSITGLYETRIDLSQLVGD

SEQ ID NO: 456 - protein, 272 aa, synthetic construct
  REGION 1..272: note = Description of Artificial Sequence: Synthetic polypeptide
KTEVQTGGFSKESILPKRNSDKLIARKKDWDPKKYGGFYSPTVAYSVLVVAKVEKGKSRKLKSVKELLGITIMERSSFEKNPIDFLEAKGYKEVKKDLIIKLPKYSLFELENGRKRMLASAGELQKGNELALPSKYVNFLYLASHYEKLKGSPEDNEQKQLFVEQHKHYLDEIIEQISEFSKRVILADANLDKVLSAYNKHRDKPIREQAENIIHLFTLTNLGAPAAFKYFDTTIDRKQYTSTKEVLDATLIHQSITGLYETRIDLSQLGGD

SEQ ID NO: 457 - protein, 272 aa, synthetic construct
  REGION 1..272: note = Description of Artificial Sequence: Synthetic polypeptide
KTEVQTGGFSKESILPKRNSDKLIARKKDWDPKKYGGFYSPTVAYSVLVVAKVEKGKSKKLKSVKELLGITIMERSSFEKNPIDFLEAKGYKEVKKDLIIKLPKYSLFELENGRKRMLASAGELQKGNELALPSKYVNFLYLASHYEKLKGSPEDNEQKQLFVEQHKHYLDEIIEQISEFSKRVILADANLDKVLSAYNKHRDKPIREQAENIIHLFTLTNLGAPAAFKYFDTTIDRKQYTSTKEVLDATLIHQSITGLYETRIDLSLLGGD

SEQ ID NO: 458 - protein, 272 aa, synthetic construct
  REGION 1..272: note = Description of Artificial Sequence: Synthetic polypeptide
KTEVQTGGFSKESILPNRNSDKLIARKKDWDPKKYGGFDSPTVAYSVLVVAKVEKGKSKKLKSVKELLGITIMERSSFEKKPIDFLEAKGYKEVKKDLIIKLPKYSLFELENGRKRMLASAGELQKGNELALPSKYVNFLYLASHYEKLKGSPEDNEQKQLFVEQHKHYLDEIIEQISEFSKRVILADANLDKVLSAYNKHRDKPIREQAENIIHLFTLTNLGAPAAFKYFDTTIDRKQYRSTKEVLDATLIHQSITGLYETRIDLSQLGGD

SEQ ID NO: 459 - protein, 272 aa, synthetic construct
  REGION 1..272: note = Description of Artificial Sequence: Synthetic polypeptide
KTEVQTGGFSKESILPKRNSDKLIARKKDWDPKKYGGFYSPTVAYSVLVVAKVKKGKSKKLKSVKELLGITIMERSSFEKNPIDFLEAKGYKEVKKDLIIKLPKYSLFELENGRKRMLASAGELQKGNELALPSKYVNFLYLASHYEKLKGSPEDNEQKQLFVEQHKHYLDEIIEQISEFSKRVILADANLDKVLSAYNKHRDKPIREQAENIIHLFTLTNLGAPAAFKYFDTTIDRKQYTSTKEVLDATLIHQSITGLYETRIDLSQLGGD

SEQ ID NO: 460 - protein, 272 aa, synthetic construct
  REGION 1..272: note = Description of Artificial Sequence: Synthetic polypeptide
KTEVQTGGFSKESILPKRNSDKLIARKKDWDPKKYGGFNSPTVAYSVLVVAKVEKGKSKKLKSVKELLGITIMERSSFEKNPIDFLEAKGYKEVKKDLIIKLPKYSLFELENGRKRMLASAGELQKGNELALPSKYVNFLYLASHYEKLKGSPEDNEQKQLFVEQHKHYLDEIIEQISEFSKRVILADANLDKVLSAYNKHRDKPIREQAENIIHLFTLTNLGAPAAFKYFDTTIDRKQYTSTKEVLDATLIHQSITGLYETRIDLSQLGGD

SEQ ID NO: 461 - protein, 272 aa, synthetic construct
  REGION 1..272: note = Description of Artificial Sequence: Synthetic polypeptide
ETEVQTGGFSKESILPKRNSDKLIARKKDWDPKKYGGFDSPTVAFSVLVVAKVEKGKSKKLKSVKELLGITIMERSFFEKNPIDFLEAKGYKEVKKDLIIKLPKYSLFELENGRKRMLASAGELQKGNELALPSKYVNFLYLASHYEKLKGSPEDNEQKQLFVEQHKHYLDEIIEQISEFSKRVILADANLDKVLSAYNKHRDKPIREQAENIIHLFTLTNLGAPAAFKYFDTTIDRKQYTSTKEVLDATLIHQSITGLYETRIDLSQLGGD

SEQ ID NO: 462 - protein, 272 aa, synthetic construct
  REGION 1..272: note = Description of Artificial Sequence: Synthetic polypeptide
KTEVQTGGFSKESILPKRNSDKLIARKKDWDPKKYGGFYSPTVAYSVLVVAKVEKGKSKKLKSVKDLLGITIMERSSFEKNPIDFLEAKGYKEVKKDLIIKLPKYSLFELENGRKRMLASAGELQKGNELALPSKYVNFLYLASHYEKLKGSPEDNEQKQLFVEQHKHYLDEIIEQISEFSKRVILVDANLDKVLSAYNKHRDKPIREQAENIIHLFTLTNLGAPAAFKYFDTTIDRKQYTSTKEVLDATLIHQSITGLYETRIDLSQLGGD

SEQ ID NO: 463 - protein, 272 aa, synthetic construct
  REGION 1..272: note = Description of Artificial Sequence: Synthetic polypeptide
KTEVQTGGFSKESILPKRNSDKLIARKKDWDPKKYGGFDSPTVAYSVLVVAKVEKGKSKKLKSVKELLGITNMERSSFEKNPIDFLEAKGYKEVKKDLIIKLPKYSLFELENGRKRMLASAEELQKGNELALPSKYVNFLYLASHYEKLKGSPEDNEQKQLFVEQHKHYLDEIIEQISEFSKRVILADANLDKVLSAYNKHRDKPIREQAENIIHLFTLTNLGAPAAFKYFDATIDRKQYRSTKEVLDATLIHQSITGLYETRIDLSQLGGD

SEQ ID NO: 464 - protein, 272 aa, synthetic construct
  REGION 1..272: note = Description of Artificial Sequence: Synthetic polypeptide
KTEVQTGGFSKESILPKRNSDKLIARKKDWDPKKYGGFDSPTVAYSVLVVAKVEKGKSKKLKSVKELLGITIMERSSFEKNPIDFLEAKGYKEVKKDLIIKLPKYSLFELENGRKRMLASAGELQKGNELALPSKYVNFLYLASHYEKLKGSPEDNEQKQLFVEQHKHYLDEIIEQISEFSKRVILADANLDKVLSAYNKHRDKPIREQAENIIHLFTLTNLGAPAAFKYFDTTIYRKQYTSTKEVLDATLIHQSITGLYETRIDLSQLGGD

SEQ ID NO: 465 - protein, 272 aa, synthetic construct
  REGION 1..272: note = Description of Artificial Sequence: Synthetic polypeptide
KTEVQTGGFSKESILPKRNSDKLIARKKDWDPKKYGGFYSPTVAYSVLVVANVEKGKSKKLKSVKELLGITIMERSSFEKNPIDFLEAKGYKEVKKDLIIKLPKYSLFELENGRKRMLASAGELQKGNELALPSKYVNFLYLASHYEKLKGSPEDNEQKQLFVEQHKHYLDEIIEQISEFSKRVILADANLDKVLSAYNKHRDKPIREQAENIIHLFTLTDLGAPAAFKYFDTTIDRKQYTSTKEVLDATLIHQSITGLYETRIDLSQLGGD

SEQ ID NO: 466 - protein, 272 aa, synthetic construct
  REGION 1..272: note = Description of Artificial Sequence: Synthetic polypeptide
KTEVQTGGFSKESILPKRNSDKLIARKKDWDPKKYGGFNSPTVAYSVLVVAKVEKGKSKKLKSVKELLGITIMERSSFEKNPIDFLEAKGYKEVKKDLIIKLPKYSLFELENGRKRMLASARELQKGNELALPSKYVNFLYLASHYEKLKGSPEDNEQKQFFVEQHKHYLDEIIEQISEFSKRVILADANLDKVLSAYNKHRDKPIREQAENIIHLFTLTNLGAPAAFKYFDTTIDRKEYRSTKEVLDATLIHQSITGLYETRIDLSQLGGD

SEQ ID NO: 467 - protein, 272 aa, synthetic construct
  REGION 1..272: note = Description of Artificial Sequence: Synthetic polypeptide
KTEMQTGGFSKESVLPKRNSDKLIARKKDWDPKKYGGFNSPTVAYSVLVVAKVEKGKSKRLKSVKELLGITIMERSSFEKNPIDFLEAKGYKEVKKDLIIKLPKYSLFELENGRKRMLASAGVLQKGNELALPSKYVNFLYLASHYEKLKGSPDDNEQKRLFVEQHKHYLDEIIEQISEFSKRVILADANRDKVLSAYNKHRDKPIREQAENIIHLFTLTNLGAPAAFKYFDTTIDRKEYRSTKEVLDATLIHQSITGLYETRIDLSQLGGD

SEQ ID NO: 468 - protein, 272 aa, synthetic construct
  REGION 1..272: note = Description of Artificial Sequence: Synthetic polypeptide
KTEVQTGGFSKESILPKRNSDKLIARKKDWDPKKYGGFYSPTVAYSVLVVAKVEKGKSKKLKSVKELLGITIMERSSFEENPIDFLEAKGYKEVKKDLIIKLPKYSLFELENGRKRMLASAGELQKGNELALPSKYVNFLYLASHYEKLKGSPKDNEQKQLFVEKHKHYLDEIIEQISEFSKRVILADANLDKVLSAYNKHRDKPIREQAENIIHLFTLTNLGAPAAFKYFDTTIDRKEYRSTKEVLDATLIHQSITGLYETRIDLSQLGGD

SEQ ID NO: 469 - protein, 272 aa, synthetic construct
  REGION 1..272: note = Description of Artificial Sequence: Synthetic polypeptide
KTEVQTGGFSKESILPKRNSDKLIARKKDWDPKKYGGFNSPTVAYSVLVVANVEKGKSKKLKSVKELLGITIMERSSYEKNPIDFLEAKGYKEVKKDLIIKLPKYSLFELENGRKRMLASAGVLQKGNELALPSKYVNFLYLASHYEKLKGSPEDNEQKQLFVEQHKHYLDEIIEQISEFSKRVILADANLDKVLSAYNKHRDKPIREQAENIIHLFTLTNLGAPAAFKYFDTTIDRKEYRSTKEVLDATLIHQSITGLYETRIDLSQLGGD

SEQ ID NO: 470 - protein, 272 aa, synthetic construct
  REGION 1..272: note = Description of Artificial Sequence: Synthetic polypeptide
KTEVQTGGFSKESILPKRNSDKLIARKKDWDPKKYGGFVSPTVAYSVLVVAKVEKGKSKKLKSVKELLGITIMERSSFEKNPIDFLEAKGYKEVKKDLIIKLPKYSLFELENGRKRMLASAGELQKGNELALPSKYVNFLYLASHYEKLKGSPEDNEQKQLFVEQHKHYLDEIIEQISEFSKRVILADANLDKVLSAYNKHRDKPIREQAENIIHLFTLTNLGAPAAFKYFDTTIDRKQYRSTKEVLDATLIHQSFTGLYETRIDLSQLGGD

SEQ ID NO: 471 - protein, 272 aa, synthetic construct
  REGION 1..272: note = Description of Artificial Sequence: Synthetic polypeptide
KTEVQTGGFSKESILPKRNSDKLIARKKDWDPKKYGGFDSPTVAYSVLVVAKVEKGKSKKLKSVKELLGITIMERSSFEKNPIDFLEAKGYKEVKKDLLIKLPKYSLFELENGRKRMLASARELQKGNELALPSKYVNFLYLASHYEKLKGSPEDNEQKQLFVEQHKHYLDEIIEQISEFSKRVILADANLDKVLSAYNKHRDKPIREQAENIIHLFTLTNLGAPAAFKYFDTTIDRKEYRSTKEVLDATLIHQSITGLYETRIDLSQLGGD

SEQ ID NO: 472 - protein, 272 aa, synthetic construct
  REGION 1..272: note = Description of Artificial Sequence: Synthetic polypeptide
KTEVQTGGFSKESILPKRNSDKLIARKKDWDPKKYGGFNSPTVAYSVLVVAKDEKGKSKKLKSVKELLGITIMERSSFEKNPIDFLEAKGYKEVKKDLIIKLPKYSLFELENGRKRMLASAGELQKGNELALPSKYVNFLYLASHYEKLKGSPEDNEQKQLFVEQHKHYLDEIIEQISEFSKRVILADANLDKVLSAYNKHRDKPICEQAENIIHLFTLTKLGAPAAFKYFDTTIDRKEYRSTKEVLDATLIHQSITGLYETRIDLSQLGGD

SEQ ID NO: 473 - protein, 272 aa, synthetic construct
  REGION 1..272: note = Description of Artificial Sequence: Synthetic polypeptide
KTEVQTGGFSKESILPKRNSDKVIARKKDWDPKKYGGFDSPTVAYSVLVVAKVEKGKSKKLKSVKELLGITIMERSSFEKNPIDFLEAKGYKEVKKDLIIKLPKYSLFELENGRKRMLASAGELQKGNELALPSKYVNFLYLASHYEKLKGSPEDNEQKQLFVEQHKHYLDEIIEQISEFSKRVILADANLDKVLSAYNKHRDKPIREQAENIIHLFTLTNLGAPAAFKYFDTTIDRKEYRSTKEVLDATLIHQSITGLYETRIDLSQLGGD

SEQ ID NO: 474 - protein, 272 aa, synthetic construct
  REGION 1..272: note = Description of Artificial Sequence: Synthetic polypeptide
KTEVQTGGFSKESILPKRNSDKLIARKKDWDPKKYGGFYSPIVAYSVLVVAKVEKGKSKKLKSVKELLGITIMERSSFEKNPIDFLEAKGYKEVKKDLIIKLPKYSLFELENGRKRMLASAGVLQKGNELALPSKYVNFLYLASHYEKLKGSPEDNEQKQLFVEQHKHYLDEIIEQISEFSKRVILADANLDKVLSAYNKHRDKPIREQAENIIHLFTLTNLGAPAAFKYFDTTIDRKEYRSTKEVLDATLIHQSITGLYETRIDLSQLGGD

SEQ ID NO: 475 - protein, 272 aa, synthetic construct
  REGION 1..272: note = Description of Artificial Sequence: Synthetic polypeptide
KTEVQTGGFSKESILPKRNSDKLIARKKDWDPKKYGGFYSPTVAYSVLVVAKVEKGKSKKLKSVKELLGITIMERSSFEKNPIDFLEAKGYKEIKKDLIIKLPKYSLFELENGRKRMLASAGELQKGNELALPSKYVNFLYLASHYEKLKGSPEDNEQKQLFVEQHKHYLDEIIEQISEFSKRVILADANLDKVLSAYNKHRDKTIREQAENTIHLFTLTNLGAPAAFKYFDTTIDRKEYRSTKEVLDATLIHQSITGLYETRIDLSQLGGD

SEQ ID NO: 476 - protein, 272 aa, synthetic construct
  REGION 1..272: note = Description of Artificial Sequence: Synthetic polypeptide
KTEVQTGGFSKESILPKRNSDKLIARKKDWDPKKYGGFYSPTVAYSVLVVAKVEKGKSKKLKSVKELLGITIMERSSFEKNPIDFLEAKGYKEVKKDLIIKLPKYSLFELENGRKRMLASAGELQKGNELALPSKYVNFLYLASHYEKLKGSPEDNEQKQLFVEQHKHYLDEIIEQISEFSKRVILADANLDKVLSAYNKHRDKPIREQAENIIHLFTLTNLGAPAAFKYFDTTIDRKEYRSTKEVLDATLIHHSITGLYETRIDLSQLGGD

SEQ ID NO: 477 - protein, 272 aa, synthetic construct
  REGION 1..272: note = Description of Artificial Sequence: Synthetic polypeptide
KTEVQTGGFSKESILPKRNSDKLIARKKDWDPKKYGGFYSPTVAYSVLVVAKVEKGKSKKLKSVKELLGITIMERSSFEKNPIDFLEAKGYKEVKKDLIIKLPKYSLFELENGRKRMLASAGELQKGNELALPSKYVNFLYLASHYEKLKGSPEDNEQKQLFVEQHKHYLDEIIEQISEFSKRVILADGNLDKVLSAYNKHRDKPIREQAENIIHLFTLTNLGAPAAFKYFDTTIDRKEYRSTKEVLDATLIHQSITGLYETRIDLSQLGGD

SEQ ID NO: 478 - protein, 272 aa, synthetic construct
  REGION 1..272: note = Description of Artificial Sequence: Synthetic polypeptide
KTEVQTGGFSKESILPKRNSDKLIARKKDWDPKKYGGFDSPTVAYSVLVVAKVEKGKSKKLKSVKELLGITIMERSSFEKNPIDFLEAKGYKEVKKDLLIKLPKYNLFELENGRKRMLASAGELQKGNELALPSKYVNFLYLASHYEKLKGSPEDNEQKQLFVEQHKHYLDEIIEQISEFSKRVILADANLDKVLSAYNKHRDKPIREQAENIIHLFTLTNLGAPAAFKYFDTTIDRKQYRSTKEVLDATLIHQSITGLYETRIDLSQLGGD

SEQ ID NO: 479 - protein, 272 aa, synthetic construct
  REGION 1..272: note = Description of Artificial Sequence: Synthetic polypeptide
KTEVQTGGFSKESILPKRNSDKLIARKKDWDPKKYGGFNSPTVAYSVLVVAKVEKGKSKKLKSVKELLGITIMERSSFEKNPIDFLEAKGYKEVKKDLIIKLPKYSLFELENGRKRMLASAGELQKGNELALPSKYVNFLYLASHYEKLKGSPDYNEQKQLFVEQHKHYLDEIIEQISEFSKRVILADANLDKVLSAYNKHRDKPIREQAENIIHLFTLTNLGAPAAFKYFDTTIDRKEYRSTKEVLDATLIHQSITGLYETRIDLSQLGGD

SEQ ID NO: 480 - protein, 272 aa, synthetic construct
  REGION 1..272: note = Description of Artificial Sequence: Synthetic polypeptide
KTEVQTGGFSKESILPKRNSDKLIARKKDWDPKKYGGFDSPKVAYSVLVVAKVEKGKSKKLKSVKELLGITIMERSSFEKNPIDFLEAKGYKEVKKDLIIKLPKYSLFELENGRKRMLASAGELQKGNELALPSKYVNFLYLASHYEKLKGSPEDNEQKQLFVEQHKHYLDEIIEQISEFSKRVILADANLDKVLSAYNKHRDKPIREQAENIIHLFTLTNLGAPAAFKYFDTTIDRKQYRSTKEVLDATLIHQSITGLYETRIDMSQLGGD

SEQ ID NO: 481 - protein, 272 aa, synthetic construct
  REGION 1..272: note = Description of Artificial Sequence: Synthetic polypeptide
KTEVQTGGFSKESILPKRNSDKLIARKKDWDPKKYGGFYSPTVAYSVLVVAKVEKGKSKKLKSVKELLGITIMERSSFEKNPIDFLEAKGYKEVKKDLIIKLPKYSLFELENGRKRMLASAGELQKGNELALPSKYVNFLYLASHYEKLKGSPEDNEQKQLFVEQHKHYLDEIIEQISEFSKRVILADANLDKVLIAYNKHRDKPIREQAENIIHLFTLTNLGAPAAFKYFDTTIDRKEYRSTKEVLDATLIHQSITGLYETRIDLSQLGGD

SEQ ID NO: 482 - protein, 272 aa, synthetic construct
  REGION 1..272: note = Description of Artificial Sequence: Synthetic polypeptide
KTEEQTGGFSKESIHPKRNSDKLIARKKDWDPKKYGGFHSPTVAYSVLVVAKVEKGKSKKLKSVKELLGITIMERSSFEKNPIDFLEAKGYKEVKKDLIIKLPKYSLFELENGRKRMLASAGELQKGNELALPSKYVNFLYLASHYEKLKGSPEDNEQKQLFVEQHKHYLDEIIEQISEFSKRVILADANLDKVLSAYNMHRDKPIREQAENIIHLFTLTNLGAPAAFKYFDTTIDRKEYRSTKEVLDATLIHQSITGLYETRIDLSQLEGD

SEQ ID NO: 483 - protein, 272 aa, synthetic construct
  REGION 1..272: note = Description of Artificial Sequence: Synthetic polypeptide
KTEVQTGGFSKESILPKRNSDKLIARKKDWDPKKYGGFYSPTVAYSVLVVAKVEKGKSKKLKSVKELLGITIMERSSFEKNPIDFLEAKGYKEVKKDLIIKLPKYSLFELENGRKRMLASAGELQKGNELALPSKYVNFLYLASHYEKLKGSPEDNEQMQLFVEQHKHYLDEIIEQISEFSKRVILADANLDKVLSAYNKHRDKPIREQAENIIHLFTLTNLGAPAAFKYFDTTIDRKEYRSTKEVLDATLIHQSITGLYETRIDLSQLGGD

SEQ ID NO: 484 - protein, 272 aa, synthetic construct
  REGION 1..272: note = Description of Artificial Sequence: Synthetic polypeptide
KTEVQTGRFSKESILPKRNSDKLIARKKDWDPKKYGGFVSPTVAYSVLVVAKVEKGKSKKLKSVKELLGITIMERSSFEKNPIDFLEAKGYKEVKKDLIIKLPKYSLFELENGRKRMLASAGELQKGNELALPSKYVNFLYLASHYEKLKGSPEDNEQKQLFVEQHKHYLDEIIEQISEFSKRVILADANLDKVLSAYNKHRDKPIREQAENIIHLFTLTNLGAPAAFKYFDTTIDRKEYRSTKEVLDATLIHQSITGLYETRIDLSQLGGD

SEQ ID NO: 485 - protein, 272 aa, synthetic construct
  REGION 1..272: note = Description of Artificial Sequence: Synthetic polypeptide
KTEVQTGGFSKESILPKRNSDKLIARKKDWDPKKYGGFDSPTVAYSVLVVAKVEKGKSKKVKSVKELLGITIMERSSFEKNPIDFLEAKGYKEVKKDLIIKLPKYSLFELENGRKRMLASAGVLQKGNELALPSKYVNFLYLASHYEKLKGSPEDNEQKQLFVEQHKHYLDEIIEQISEFSKRVILADANLDKVLSAYNKHRDKPIREQAENIIHLFTLTNLGAPAAFKYFDTTIDRKEYRSTKEVLDATLIHQSITGLYETRIDLSQLGGD

SEQ ID NO: 486 - protein, 272 aa, synthetic construct
  REGION 1..272: note = Description of Artificial Sequence: Synthetic polypeptide
KTEVQTGGFSKESILPKRNSDKLIARKKDWDPKKYGGFYSPTVAYSVLVVAKVEKGKSKKLKSVKELLGITIMERSSFEKNPIDFLEAKGYKEVKKDLIIKLPKYSLFELENGRKRMLASAGELQKGNELALPSKYVNFLYLASHFEKLKGSPEDNEQKQLFVEQHKHYLDEIIEQISEFSKRVILADANLDKVLSAYNKHRDKPIREQAENIIHLFTLTNLGAPAAFKYFDTMIDRKEYRSTKEVLDATLIHQSITGLYETRIDLSQLGGD

SEQ ID NO: 487 - protein, 272 aa, synthetic construct
  REGION 1..272: note = Description of Artificial Sequence: Synthetic polypeptide
KTEVQTGGFSKESILPKRNSDKLIARKKDWDPKKYGGFVSPTVAYSVLVVAKVEKGKSKKLKSVKELLGITIMERSSFEKNPIDFLEAKGYKEVKKDLIIKLPKYSLFELENGRKRMLASAGELQKGNELALPSKYVNFLYLASHYEKLKGSPEDNEQKQLFVEQPKHYLDEIIEQISEFSKRVILADANLDKVLSAYNKHRDKPIREQAENIIHLFTLTNLGAPAAFKYFDTTIDRKEYRSTKEVLDATLIHQSITGLYETRIDLSQLGGD

SEQ ID NO: 488 - protein, 272 aa, synthetic construct
  REGION 1..272: note = Description of Artificial Sequence: Synthetic polypeptide
KTEVQTGGFSKESILPKRNSDKLIARKKDWDPKKYGGFVSPTVAYSVLVVAKVEKGKSKKLKSVKELLGITIMERSSFEKNPIDFLEAKGYKEVKKDLIIKLPKYSLFELENGRKRMLASAGELQKGNEIALPSKYVNFLYLASHYEKLKGSPEDNEQKQLFVEQHKHYLDEIIEQISEFSKRVILADANLDKVLSAYNKHRDKPIREQAENIIHLFTLTNLGAPAAFKYFDTKIDRKEYRSTKEVLDATLIHQSITGLYETRIDLSQLGGD

SEQ ID NO: 489 - protein, 272 aa, synthetic construct
  REGION 1..272: note = Description of Artificial Sequence: Synthetic polypeptide
KTEVQTGGFSKESILPKRNSDKLIARKKDWDPKKYGGFYSPTVAYSVLVVAKVEKGKSKKLKSVKELLGITIMERSSFEKNPIDFLEAKGYKEVKKDLIIKLPKYSLFELENGRKRMLASAGELQKGNELALPSKYVNFLYLASHYEKLKGSPEDNEQKQLFVEQHKHYLDEIIEQISEFSKRVILADANLDKVLSAYNKHRDKPIREQAENIIHLFTLTNLGAPAAFKYFDTTIDRKEYRSTKEVLDATLIHQSITGLYETRIDLSQLGGD

SEQ ID NO: 490 - protein, 272 aa, synthetic construct
  REGION 1..272: note = Description of Artificial Sequence: Synthetic polypeptide
KTEVQTGGFSKESILPKRNSDKLIARKKDWDPKKYGGFDSPTVAYSVLVVAKVEKGKSKKLKSVKELLGITIMERSSFEKNPIDFLEAKGYKEVKKDLIIKLPKYSLFELENGRKRMLASAGVLQKGNELALPSKYVNFLYLASHYEKLKGSPEDNEQKQLFVEQHKHYLDEIIEQISEFSKRVILADANLDKVLSAYNKHRDKPIREQAENIIHLFTLTNLGAPAAFKYFDTTIDRKEYRSTKEVLDATLIHQSITGLYETRIDLSQLGGD

SEQ ID NO: 491 - protein, 272 aa, synthetic construct; identical to SEQ ID NO: 489
  REGION 1..272: note = Description of Artificial Sequence: Synthetic polypeptide

SEQ ID NO: 492 - protein, 272 aa, synthetic construct; identical to SEQ ID NO: 489
  REGION 1..272: note = Description of Artificial Sequence: Synthetic polypeptide

SEQ ID NO: 493 - protein, 272 aa, synthetic construct
  REGION 1..272: note = Description of Artificial Sequence: Synthetic polypeptide
KTEVQTGGFSKESILPKRNSDKLIARKKDWDPKKYGGFDSPTVAYSVLVVAKVEKGKSKKLKSVKELLGITIMERSSFEKNPFDFLEAKGYKEVKKDLIIKLPKYSLFELENGRKRMLASAGELQKGNELALPSKYVNFLYLASHYEKLKGSPEDNEQKQLFVEQHKHYLDEIIEQISEFSKRVILADPNLDKVLSAYNKHRDKPIREQAENIIHLFTLTNLGAPAAFKYFDTTIDRKEYRSTKEVLDATLIHQSITGLYETRIDLSQLGGD

SEQ ID NO: 494 - protein, 272 aa, synthetic construct
  REGION 1..272: note = Description of Artificial Sequence: Synthetic polypeptide
KTEVQTGGFSKESILPKRNSDKLIARKKDWDPKKYGGFLSPTVAYSVLVVAKVEKGKSKKLKSVKELLGITIMERSSFEKNPIDFLEAKGYKEVKKDLIIKLPKYSLFELENGRKRMLASAGELQKGNELALPSKYVNFLYLASHYEKLKGSPEDNEQKQLFVEQHKHYLDEIIEQISEFSKRVILADANLDKVLSAYNKHRDKPIREQAENIIHLFTLTNLGAPAAFKYFDTTIDRKEYRSTKEVLDATLIHQSITGLYETRIDLSQLGGD

SEQ ID NO: 495 - protein, 272 aa, synthetic construct
  REGION 1..272: note = Description of Artificial Sequence: Synthetic polypeptide
KTEVQTGGFSKESILPKRNSDKLIARKKDWDPKKYGGFDSPTVAYSVLVVAKVEKGKSKKLKSVKELLGITIMERSSFEKNPIDFLEAKGYKEVKKDLIIKLPKYSLFELENGRKRMLASAGELQKGNELALPSKYVNFLYLASHYEKLKGSPEDNEQKQLFVEQHKHYLDEIIEQISEFSKRVILADANLDKVLSAYNKHRDKPIREQAENIIHLFTLTNLGAPAAFKYFDTTIDRKEYRSTKEVLDATLIHQSITGLYETRIDLSQLGGD

SEQ ID NO: 496 - protein, 272 aa, synthetic construct
  REGION 1..272: note = Description of Artificial Sequence: Synthetic polypeptide
KTEVQTGGFSKESILPKRNSDKLIARKKDWDPKKYGGFYSPTVAYSVLVVAKVEKGKSKKLKSVIELLGITIMERSSFEKNPIDFLEAKGYKEVKKDLIIKLPKYSLFELENGRKRMLASAGELQKGNELALPSKYVNFLYLASHYEKLKGSPEDNEQKQLFVEQHKHYLDEIIEQISEFSKRVILADANLDKVLSAYNKHRDKPIREQAENIIHLFTLTNLGAPAAFKYFDTTIDRKEYRSTKEVLDATLIHQSITGLYETRIDLSQLGGD

SEQ ID NO: 497 - protein, 272 aa, synthetic construct; identical to SEQ ID NO: 489
  REGION 1..272: note = Description of Artificial Sequence: Synthetic polypeptide

SEQ ID NO: 498 - protein, 272 aa, synthetic construct
  REGION 1..272: note = Description of Artificial Sequence: Synthetic polypeptide
KTEVQTGGFSKESILPKRNSDKLIARKKDWDPKKYGGFDSPTVAYSVLVVAKVEKGKTKKLKSVKELLGITIMERSSFEKNPIDFLEAKGYKEVIKDFIIKLPKYSLFELENGRKRMLASAGELQKGNELALPSKYVNFLYLASHYEKLKGSPEDNEQKQLFVEQHKHYLDEIIEQISEFSKRVILADANLDKVLSAYNKHRDKPIREQAENIIHLFTLTNLGAPAAFKYFDTTIDRKQYRSPKEVLDATLIHQSITGLYETRIDLSQLGGD

SEQ ID NO: 499 - protein, 272 aa, synthetic construct; identical to SEQ ID NO: 489
  REGION 1..272: note = Description of Artificial Sequence: Synthetic polypeptide

SEQ ID NO: 500 - protein, 272 aa, synthetic construct
  REGION 1..272: note = Description of Artificial Sequence: Synthetic polypeptide
KTEVQTGGFSKESILPKRNSDKLIARKKDWDPKKYGGFYSPTVAYSVPVVAKVEKGKSKKLKSVKELLGITIMERSSFEKNPIDFLEAKGYKEVKKDLIIKLPKYSLFELESGRKRMLASAGELQKGNELALPSKYVNFLYLASHYEKLKGSPEDNEQKQLFVEQHKHYLDEIIEQISEFSKRVILADANLDKVLSAYNKHRDKPIREQAENIIHLFTLTNLGAPAAFKYFDTTIDRKEYRSTKEVLDATLIHQSITGLYETRIDLSQLGGD

SEQ ID NO: 501 - protein, 272 aa, synthetic construct
  REGION 1..272: note = Description of Artificial Sequence: Synthetic polypeptide
KTEVQTGGFSKESILPKRNSDKLIARKKDWDPKKYGGFYSPTVAYSVLVVAKVEKGKSKKLKSVKELLGITIMERSSFEKNPIDFLEAKGYKEVNKDLIIKLPKYSLFELENGRKRMLASAGELQKGNELALPSKYVNFLYLASHYEKLKGSPEDNEQKQLFVEQHKHYLDEIIEQISEFSKRVILADANLDKVLSAYNKHRDKPIREQAENIIHLFTLTNLGAPAAFKYFDTTIDRKTYRSTKEVLDATLIHQSITGLYETRIDLSQLGGD

SEQ ID NO: 502 - protein, 272 aa, synthetic construct
  REGION 1..272: note = Description of Artificial Sequence: Synthetic polypeptide
KTEVQTGGFSKESILPKRNSDKLIARKKDWDPKKYGGFYSPTVAYSVLVVAKVEKGKSKKLKSVKELLGITIMERSSFEKNPIDFLEAKGYKEVKKDLIIKLPKYSLFELENGRKRMLASAGELQKGNELALPSKYVNFLYLASHYEKLKGSPEDNEQKQLFVEQHKHYLDEIIEQISEFSKRVILADANLDKVLSAYNKHRDKPIHEQAENIIHLFTLTNLGAPAAFKYFDTTIDRKTYRSTKEVLDATLIHQSITGLYETRIDLSQLGGD

SEQ ID NO: 503 - protein, 272 aa, synthetic construct
  REGION 1..272: note = Description of Artificial Sequence: Synthetic polypeptide
KTEVQTGGFSKESILPKRNSDKLIARKKDWDPKKYGGFDSPTVAYSVLVVAKVEKGKSKKLKSVKELLGITIMERSSFEKNPIDFLEAKGYKEVKKDLMIKLPKYSLFELKNGRKRMLASAGELQKGNELALPSKYVNFLYLASHYEKLKGSPEDNEQKQLFVEQHKHYLDEIIEQISEFSKRVILADANLDKVLSAYNKHRDKPIREQAENIIHLFTLTKLGAPAAFKYFDTTIDRKTYRSTKEVLDATLIHHSITGLYETRIDLSQLGGD

SEQ ID NO: 504 - protein, 272 aa, synthetic construct
  REGION 1..272: note = Description of Artificial Sequence: Synthetic polypeptide
KTEVQTGGFSKESILPKRNSDKLIARKKDWDPKKYGGFDSPTVAYSVLVVAKVEKGKSKKLKSVKELLGITIMERSSFEKNPIDFLEAKGYKEVKKDLIIKLPKYSLFELENGRKRMLASARELQKGNELALPSKYVNFLYLASHYEKLKGSPEDNEQKQLFVEQHKHYLDEIIEQISEFSKRVILADANLDKVLSAYNKHRDKPIREQAENIIHLFTLTNLGAPAAFKYFDTTIDRKTYRSTKEVLDATLIHQSITGLYETRIDLSQLGGD

SEQ ID NO: 505 - protein, 272 aa, synthetic construct
  REGION 1..272: note = Description of Artificial Sequence: Synthetic polypeptide
KTEVQTGGFSKESILPKRNSDKLIARKKDWDPKKYGGLYSPTVAYSVLVVAKVEKGKSKKLKSVKELLGITIMERSSFEKNPIDFLEAKGYKEVKRDLIIKLPKYSLFELKNGRKRMLASAGELQKGNELALPSKYVNFLYLASHYEKLKGSPEDNEQKQLFVEQHKHYLDEIIEQISEFSKRVILADANLDKVLSAYNKHRDKPIREQAENIIHLFTLTNLGAPAAFKYFDTTIDRKTYRSTKEVVDATLIHQSITGLYETRIDLSQLGGD

SEQ ID NO: 506 - protein, 272 aa, synthetic construct
  REGION 1..272: note = Description of Artificial Sequence: Synthetic polypeptide
KTEVQTGGFSKESIHPKRNSDKLIARKKDWDPKKYGGFNSPTVAYSVLVVAKVEKGKSKKLKSVKELLGITIMERSSFEKNPIDFLEAKGYKEVKKDLIITLPKYSLFELENGRKRMLASAGELQKGNELALPSKYVNFLYLASHYEKLKGSPEDNEQKQLFVEQHKHYLDEIIEQISEFSKRVILADSNLDKVLSAYNKHRDKPIREQAENIIHLFTLTNLGAPAAFKYFDTTIDRKTYRSTKEVLDATLIHQSITGLYETRIDLSQLGGD

SEQ ID NO: 507 - protein, 272 aa, synthetic construct
  REGION 1..272: note = Description of Artificial Sequence: Synthetic polypeptide
KTEVQTGGFSKESILPKGNSDKLIARKKDWDPKKYGGFNSPTVAYSVLVVAKVEKGKSKKLKSVKELLGITIMERSSFEKNPIDFLEAKGYKEVKKDLIIKLPKYSLFELENGRKRMLASAGELQKGNELALPSKYVNFLYLASHYEKLKGSPEDNEQKQLFVEQHKHYLDEIIEQISEFSKRVILADANLDKVLSAYNKHRDKPIREQAENIIHLFTLTNLGAPAAFKYFDTTIDRKTYRSTKEVLDATLIHQSITGLYETRIDLSQLGGD

SEQ ID NO: 508 - protein, 272 aa, synthetic construct
  REGION 1..272: note = Description of Artificial Sequence: Synthetic polypeptide
KTEVQTGGFSKESILPKRNSDKLIARKKDWDPKKYGGFDSPTVAYSVLVVAKVEKGKSKKLKSVKDLLGITIMERSSFEKNPIDFLEAKGYKEVKKDLMIKLPKYSLFELENGRKRMLASARELQKGNELALPSKYVNFLYLASHYEKLKGSPEDNEQKQLFVEQHKHYLDEIIEQISEFSKRVILADANLDKVLSAYNKHRDKPIREQAENIVHLFTLTNLGAPAAFKYFDTTIDRKTYRSTKEVLDATLIHQSITGLYETRIDLSQLGGD

SEQ ID NO: 509 - protein, 272 aa, synthetic construct
  REGION 1..272: note = Description of Artificial Sequence: Synthetic polypeptide
KTEVQTGGFSKESILPKRNSDKLIARKKDWDPKKYGGFNSPTVAYSVLVVAKVEKGKSKKLKSVKELLGITIMERSSFEKNPIDFLEAKGYKEIKKDLIIKLPKYSLFELENGRKRMLASAGELQKGNELALPSKYVNFLYLASHYEKLKGSPEDNEQKQLFVEQHKHYLDEIIEQISEFSKRVILADVNLDKVLSAYNKHRDKPIREQAENIIHLFTLTNLGAPAAFKYFDTTIDRKTYRSTKEVLDATLIHQSITGLYETRIDLSQLGGD

SEQ ID NO: 510 - protein, 272 aa, synthetic construct
  REGION 1..272: note = Description of Artificial Sequence: Synthetic polypeptide
KTEVQTGGFSKESIHPKRNSDKLIARKKDWDPKKYGGFDSPTVAYSVLVVAKVEKGKSKKLKSVKELLGITIMERSSFEKNPIDFLEAKGYKEVKKDLIIKLPKYSLFELENGRKRMLASARELQKGNELALPSKYVNFLYLASHYEKLKGSPEDNEQKQLFVEQHKHYLDEIIEQISEFSKRVILADANLDKVLSAYNKDRDKPIREQAENIIHLFTLTNLGAPAAFKYFDTTIDRKTYRSTKEVLDATLIHQSITGLYETRIDLSQLGGD

SEQ ID NO: 511-514 - skipped (4 entries)

SEQ ID NO: 515 - DNA, 50 bp, synthetic construct
  misc_feature 1..50: note = Description of Artificial Sequence: Synthetic oligonucleotide
  source 1..50: mol_type = other DNA
ctagagggtgggcgggagggtcgccctcgaacttcaccttggagtgcatg

SEQ ID NO: 516 - DNA, 42 bp, synthetic construct
  misc_feature 1..42: note = Description of Artificial Sequence: Synthetic oligonucleotide
  source 1..42: mol_type = other DNA
cactccaaggtgaagttcgagggcgaccctcccgcccaccct

SEQ ID NO: 517 - DNA, 67 bp, synthetic construct
  misc_feature 1..67: note = Description of Artificial Sequence: Synthetic oligonucleotide
  source 1..67: mol_type = other DNA
gcaggaattcgggaggggcacgggcagcttgccggnnnnnnnnctnnngcgcaggtcacgaggcatg

SEQ ID NO: 518 - DNA, 67 bp, synthetic construct
  misc_feature 1..67: note = Description of Artificial Sequence: Synthetic oligonucleotide
  source 1..67: mol_type = other DNA
gcaggaattcggagggtcgccctcgaacttcacctnnnnnnnnctnnngcgcaggtcacgaggcatg

SEQ ID NO: 519 - DNA, 21 bp, synthetic construct
  misc_feature 1..21: note = Description of Artificial Sequence: Synthetic oligonucleotide
  source 1..21: mol_type = other DNA
gttgtactccagcttgtgccc

SEQ ID NO: 520 - DNA, 27 bp, synthetic construct
  misc_feature 1..27: note = Description of Artificial Sequence: Synthetic oligonucleotide
  source 1..27: mol_type = other DNA
gttgtactccagcttgtgccccaggat

SEQ ID NO: 521 - DNA, 20 bp, synthetic construct
  misc_feature 1..20: note = Description of Artificial Sequence: Synthetic oligonucleotide
  source 1..20: mol_type = other DNA
ggacggcgacgtaaacggcc

SEQ ID NO: 522 - DNA, 26 bp, synthetic construct
  misc_feature 1..26: note = Description of Artificial Sequence: Synthetic oligonucleotide
  source 1..26: mol_type = other DNA
ggacggcgacgtaaacggccacaagt

SEQ ID NO: 523 - DNA, 21 bp, synthetic construct
  misc_feature 1..21: note = Description of Artificial Sequence: Synthetic oligonucleotide
  source 1..21: mol_type = other DNA
gaacttcagggtcagcttgcc

SEQ ID NO: 524 - DNA, 27 bp, synthetic construct
  misc_feature 1..27: note = Description of Artificial Sequence: Synthetic oligonucleotide
  source 1..27: mol_type = other DNA
gaacttcagggtcagcttgccgtaggt

SEQ ID NO: 525 - DNA, 20 bp, synthetic construct
  misc_feature 1..20: note = Description of Artificial Sequence: Synthetic oligonucleotide
  source 1..20: mol_type = other DNA
gtcgatgcccttcagctcga

SEQ ID NO: 526 - DNA, 26 bp, synthetic construct
  misc_feature 1..26: note = Description of Artificial Sequence: Synthetic oligonucleotide
  source 1..26: mol_type = other DNA
gtcgatgcccttcagctcgatgcggt

SEQ ID NO: 527 - DNA, 22 bp, synthetic construct
  misc_feature 1..22: note = Description of Artificial Sequence: Synthetic oligonucleotide
  source 1..22: mol_type = other DNA
gtgaccaccctgacctacggcg

SEQ ID NO: 528 - DNA, 28 bp, synthetic construct
  misc_feature 1..28: note = Description of Artificial Sequence: Synthetic oligonucleotide
  source 1..28: mol_type = other DNA
gtgaccaccctgacctacggcgtgcagt

SEQ ID NO: 529 - DNA, 20 bp, synthetic construct
  misc_feature 1..20: note = Description of Artificial Sequence: Synthetic oligonucleotide
  source 1..20: mol_type = other DNA
gatatagacgttgtggctgt

SEQ ID NO: 530 - DNA, 26 bp, synthetic construct
  misc_feature 1..26: note = Description of Artificial Sequence: Synthetic oligonucleotide
  source 1..26: mol_type = other DNA
gatatagacgttgtggctgttgtagt

SEQ ID NO: 531 - DNA, 21 bp, synthetic construct
  misc_feature 1..21: note = Description of Artificial Sequence: Synthetic oligonucleotide
  source 1..21: mol_type = other DNA
ggtgaagttcgagggcgacac

SEQ ID NO: 532 - DNA, 27 bp, synthetic construct
  misc_feature 1..27: note = Description of Artificial Sequence: Synthetic oligonucleotide
  source 1..27: mol_type = other DNA
ggtgaagttcgagggcgacaccctggt

SEQ ID NO: 533 - DNA, 26 bp, synthetic construct
  misc_feature 1..26: note = Description of Artificial Sequence: Synthetic oligonucleotide
  source 1..26: mol_type = other DNA
gcgtgtccggcgagggcgagggcgat

SEQ ID NO: 534 - DNA, 22 bp, synthetic construct
  misc_feature 1..22: note = Description of Artificial Sequence: Synthetic oligonucleotide
  source 1..22: mol_type = other DNA
gctcgaccaggatgggcaccac

SEQ ID NO: 535 - DNA, 28 bp, synthetic construct
  misc_feature 1..28: note = Description of Artificial Sequence: Synthetic oligonucleotide
  source 1..28: mol_type = other DNA
gctcgaccaggatgggcaccaccccggt

SEQ ID NO: 536 - DNA, 21 bp, synthetic construct
  misc_feature 1..21: note = Description of Artificial Sequence: Synthetic oligonucleotide
  source 1..21: mol_type = other DNA
gggcgaggagctgttcaccgg

SEQ ID NO: 537 - DNA, 27 bp, synthetic construct
  misc_feature 1..27: note = Description of Artificial Sequence: Synthetic oligonucleotide
  source 1..27: mol_type = other DNA
gggcgaggagctgttcaccggggtggt

SEQ ID NO: 538 - DNA, 21 bp, synthetic construct
  misc_feature 1..21: note = Description of Artificial Sequence: Synthetic oligonucleotide
  source 1..21: mol_type = other DNA
gcactgcacgccgtaggtcag

SEQ ID NO: 539 - DNA, 27 bp, synthetic construct
  misc_feature 1..27: note = Description of Artificial Sequence: Synthetic oligonucleotide
  source 1..27: mol_type = other DNA
gcactgcacgccgtaggtcagggtggt

SEQ ID NO: 540 - DNA, 22 bp, synthetic construct
  misc_feature 1..22: note = Description of Artificial Sequence: Synthetic oligonucleotide
  source 1..22: mol_type = other DNA
gtgtggttccagaaccggagga

SEQ ID NO: 541 - DNA, 28 bp, synthetic construct
  misc_feature 1..28: note = Description of Artificial Sequence: Synthetic oligonucleotide
  source 1..28: mol_type = other DNA
gtgtggttccagaaccggaggacaaagt

SEQ ID NO: 542 - DNA, 21 bp, synthetic construct
  misc_feature 1..21: note = Description of Artificial Sequence: Synthetic oligonucleotide
  source 1..21: mol_type = other DNA
gcaggctctccgaggagaagg

SEQ ID NO: 543 - DNA, 27 bp, synthetic construct
  misc_feature 1..27: note = Description of Artificial Sequence: Synthetic oligonucleotide
  source 1..27: mol_type = other DNA
gcaggctctccgaggagaaggccaagt

SEQ ID NO: 544 - DNA, 23 bp, synthetic construct
  misc_feature 1..23: note = Description of Artificial Sequence: Synthetic oligonucleotide
  source 1..23: mol_type = other DNA
gcccctccctccctggcccaggt

SEQ ID NO: 545 - DNA, 29 bp, synthetic construct
  misc_feature 1..29: note = Description of Artificial Sequence: Synthetic oligonucleotide
  source 1..29: mol_type = other DNA
gcccctccctccctggcccaggtgaaggt

SEQ ID NO: 546 - DNA, 21 bp, synthetic construct
  misc_feature 1..21: note = Description of Artificial Sequence: Synthetic oligonucleotide
  source 1..21: mol_type = other DNA
gctcagcctgagtgttgaggc

SEQ ID NO: 547 - DNA, 27 bp, synthetic construct
  misc_feature 1..27: note = Description of Artificial Sequence: Synthetic oligonucleotide
  source 1..27: mol_type = other DNA
gctcagcctgagtgttgaggccccagt

SEQ ID NO: 548 - DNA, 22 bp, synthetic construct
  misc_feature 1..22: note = Description of Artificial Sequence: Synthetic oligonucleotide
  source 1..22: mol_type = other DNA
gcctgcttcgtggcaatgcgcc

SEQ ID NO: 549 - DNA, 28 bp, synthetic construct
  misc_feature 1..28: note = Description of Artificial Sequence: Synthetic oligonucleotide
  source 1..28: mol_type = other DNA
gcctgcttcgtggcaatgcgccaccggt

SEQ ID NO: 550 - DNA, 21 bp, synthetic construct
  misc_feature 1..21: note = Description of Artificial Sequence: Synthetic oligonucleotide
  source 1..21: mol_type = other DNA
gcaaccacaaacccacgaggg

SEQ ID NO: 551 - DNA, 27 bp, synthetic construct
  misc_feature 1..27: note = Description of Artificial Sequence: Synthetic oligonucleotide
  source 1..27: mol_type = other DNA
gcaaccacaaacccacgagggcagagt

SEQ ID NO: 552 - DNA, 21 bp, synthetic construct
  misc_feature 1..21: note = Description of Artificial Sequence: Synthetic oligonucleotide
  source 1..21: mol_type = other DNA
ggcctccccaaagcctggcca

SEQ ID NO: 553 - DNA, 27 bp, synthetic construct
  misc_feature 1..27: note = Description of Artificial Sequence: Synthetic oligonucleotide
  source 1..27: mol_type = other DNA
ggcctccccaaagcctggccagggagt

SEQ ID NO: 554 - DNA, 23 bp, synthetic construct
  misc_feature 1..23: note = Description of Artificial Sequence: Synthetic oligonucleotide
  source 1..23: mol_type = other DNA
gcagaagctggaggaggaagggc

SEQ ID NO: 555 - DNA, 29 bp, synthetic construct
  misc_feature 1..29: note = Description of Artificial Sequence: Synthetic oligonucleotide
  source 1..29: mol_type = other DNA
gcagaagctggaggaggaagggcctgagt

SEQ ID NO: 556 - DNA, 22 bp, synthetic construct
  misc_feature 1..22: note = Description of Artificial Sequence: Synthetic oligonucleotide
  source 1..22: mol_type = other DNA
gcttcgtggcaatgcgccaccg

SEQ ID NO: 557 - DNA, 28 bp, synthetic construct
  misc_feature 1..28: note = Description of Artificial Sequence: Synthetic oligonucleotide
  source 1..28: mol_type = other DNA
gcttcgtggcaatgcgccaccggttgat

SEQ ID NO: 558 - DNA, 21 bp, synthetic construct
  misc_feature 1..21: note = Description of Artificial Sequence: Synthetic oligonucleotide
  source 1..21: mol_type = other DNA
ggctctccgaggagaaggcca

SEQ ID NO: 559 - DNA, 27 bp, synthetic construct
  misc_feature 1..27: note = Description of Artificial Sequence: Synthetic oligonucleotide
  source 1..27: mol_type = other DNA
ggctctccgaggagaaggccaagtggt

SEQ ID NO: 560 - DNA, 22 bp, synthetic construct
  misc_feature 1..22: note = Description of Artificial Sequence: Synthetic oligonucleotide
  source 1..22: mol_type = other DNA
gcctctctgcaatgctattggt

SEQ ID NO: 561 - DNA, 28 bp, synthetic construct
  misc_feature 1..28: note = Description of Artificial Sequence: Synthetic oligonucleotide
  source 1..28: mol_type = other DNA
gcctctctgcaatgctattggtcgaaat

SEQ ID NO: 562 - DNA, 21 bp, synthetic construct
  misc_feature 1..21: note = Description of Artificial Sequence: Synthetic oligonucleotide
  source 1..21: mol_type = other DNA
gcgtactgattggaacatccg

SEQ ID NO: 563 - DNA, 27 bp, synthetic construct
  misc_feature 1..27: note = Description of Artificial Sequence: Synthetic oligonucleotide
  source 1..27: mol_type = other DNA
gcgtactgattggaacatccgcgaaat

SEQ ID NO: 564 - DNA, 23 bp, synthetic construct
  misc_feature 1..23: note = Description of Artificial Sequence: Synthetic oligonucleotide
  source 1..23: mol_type = other DNA
gacgtcacagtgaccgagggcct

SEQ ID NO: 565 - DNA, 29 bp, synthetic construct
  misc_feature 1..29: note = Description of Artificial Sequence: Synthetic oligonucleotide
  source 1..29: mol_type = other DNA
gacgtcacagtgaccgagggcctggaagt

SEQ ID NO: 566 - DNA, 23 bp, synthetic construct
  misc_feature 1..23: note = Description of Artificial Sequence: Synthetic oligonucleotide
  source 1..23: mol_type = other DNA
gcccggcgcacggtggcggggtc

SEQ ID NO: 567 - DNA, 29 bp, synthetic construct
  misc_feature 1..29: note = Description of Artificial Sequence: Synthetic oligonucleotide
  source 1..29: mol_type = other DNA
gcccggcgcacggtggcggggtcccaggt

SEQ ID NO: 568 - DNA, 21 bp, synthetic construct
  misc_feature 1..21: note = Description of Artificial Sequence: Synthetic oligonucleotide
  source 1..21: mol_type = other DNA
ggcggggtcccaggtgctgac

SEQ ID NO: 569 - DNA, 27 bp, synthetic construct
  misc_feature 1..27: note = Description of Artificial Sequence: Synthetic oligonucleotide
  source 1..27: mol_type = other DNA
ggcggggtcccaggtgctgacgtaggt

SEQ ID NO: 570 - DNA, 21 bp, synthetic construct
  misc_feature 1..21: note = Description of Artificial Sequence: Synthetic oligonucleotide
  source 1..21: mol_type = other DNA
ggcgtatcatttcgcggatgt

SEQ ID NO: 571 - DNA, 27 bp, synthetic construct
  misc_feature 1..27: note = Description of Artificial Sequence: Synthetic oligonucleotide
  source 1..27: mol_type = other DNA
ggcgtatcatttcgcggatgttccaat

SEQ ID NO: 572 - DNA, 22 bp, synthetic construct
  misc_feature 1..22: note = Description of Artificial Sequence: Synthetic oligonucleotide
  source 1..22: mol_type = other DNA
gagaccgccagaagctcggaaa

SEQ ID NO: 573 - DNA, 28 bp, synthetic construct
  misc_feature 1..28: note = Description of Artificial Sequence: Synthetic oligonucleotide
  source 1..28: mol_type = other DNA
gagaccgccagaagctcggaaaagcgat

SEQ ID NO: 574 - DNA, 21 bp, synthetic construct
  misc_feature 1..21: note = Description of Artificial Sequence: Synthetic oligonucleotide
  source 1..21: mol_type = other DNA
ggatcgcttttccgagcttct

SEQ ID NO: 575 - DNA, 27 bp, synthetic construct
  misc_feature 1..27: note = Description of Artificial Sequence: Synthetic oligonucleotide
  source 1..27: mol_type = other DNA
ggatcgcttttccgagcttctggcggt

SEQ ID NO: 576 - DNA, 22 bp, synthetic construct
  misc_feature 1..22: note = Description of Artificial Sequence: Synthetic oligonucleotide
  source 1..22: mol_type = other DNA
gcgcccactgcaaggcccggcg

SEQ ID NO: 577 - DNA, 28 bp, synthetic construct
  misc_feature 1..28: note = Description of Artificial Sequence: Synthetic oligonucleotide
  source 1..28: mol_type = other DNA
gcgcccactgcaaggcccggcgcacggt

SEQ ID NO: 578 - DNA, 21 bp, synthetic construct
  misc_feature 1..21: note = Description of Artificial Sequence: Synthetic oligonucleotide
  source 1..21: mol_type = other DNA
gtagggccttcgcgcacctca

SEQ ID NO: 579 - DNA, 27 bp, synthetic construct
  misc_feature 1..27: note = Description of Artificial Sequence: Synthetic oligonucleotide
  source 1..27: mol_type = other DNA
gtagggccttcgcgcacctcatggaat

SEQ ID NO: 580 - DNA, 22 bp, synthetic construct
  misc_feature 1..22: note = Description of Artificial Sequence: Synthetic oligonucleotide
  source 1..22: mol_type = other DNA
gcagccgccgctccagagccgt

SEQ ID NO: 581 - DNA, 28 bp, synthetic construct
  misc_feature 1..28: note = Description of Artificial Sequence: Synthetic oligonucleotide
  source 1..28: mol_type = other DNA
gcagccgccgctccagagccgtgcgaat

SEQ ID NO: 582 - DNA, 22 bp, synthetic construct
  misc_feature 1..22: note = Description of Artificial Sequence: Synthetic oligonucleotide
  source 1..22: mol_type = other DNA
ggccatgccgaccaaagcgccg

SEQ ID NO: 583 - DNA, 28 bp, synthetic construct
  misc_feature 1..28: note = Description of Artificial Sequence: Synthetic oligonucleotide
  source 1..28: mol_type = other DNA
ggccatgccgaccaaagcgccgatggat

SEQ ID NO: 584 - DNA, 21 bp, synthetic construct
  misc_feature 1..21: note = Description of Artificial Sequence: Synthetic oligonucleotide
  source 1..21: mol_type = other DNA
gcaaggcccggcgcacggtgg

SEQ ID NO: 585 - DNA, 27 bp, synthetic construct
  misc_feature 1..27: note = Description of Artificial Sequence: Synthetic oligonucleotide
  source 1..27: mol_type = other DNA
gcaaggcccggcgcacggtggcggggt

SEQ ID NO: 586 - DNA, 22 bp, synthetic construct
  misc_feature 1..22: note = Description of Artificial Sequence: Synthetic oligonucleotide
  source 1..22: mol_type = other DNA
gaggcaagagggcggctttggg

SEQ ID NO: 587 - DNA, 28 bp, synthetic construct
  misc_feature 1..28: note = Description of Artificial Sequence: Synthetic oligonucleotide
  source 1..28: mol_type = other DNA
gaggcaagagggcggctttgggcggggt

SEQ ID NO: 588 - DNA, 22 bp, synthetic construct
  misc_feature 1..22: note = Description of Artificial Sequence: Synthetic oligonucleotide
  source 1..22: mol_type = other DNA
gtgaccgagggcctggaagttc

SEQ ID NO: 589 - DNA, 28 bp, synthetic construct
  misc_feature 1..28: note = Description of Artificial Sequence: Synthetic oligonucleotide
  source 1..28: mol_type = other DNA
gtgaccgagggcctggaagttcgctaat

SEQ ID NO: 590 - DNA, 21 bp, synthetic construct
  misc_feature 1..21: note = Description of Artificial Sequence: Synthetic oligonucleotide
  source 1..21: mol_type = other DNA
ggggtcccaggtgctgacgta

SEQ ID NO: 591 - DNA, 27 bp, synthetic construct
  misc_feature 1..27: note = Description of Artificial Sequence: Synthetic oligonucleotide
  source 1..27: mol_type = other DNA
ggggtcccaggtgctgacgtaggtagt

SEQ ID NO: 592 - DNA, 22 bp, synthetic construct
  misc_feature 1..22: note = Description of Artificial Sequence: Synthetic oligonucleotide
  source 1..22: mol_type = other DNA
gtactgattggaacatccgcga

SEQ ID NO: 593 - DNA, 28 bp, synthetic construct
  misc_feature 1..28: note = Description of Artificial Sequence: Synthetic oligonucleotide
  source 1..28: mol_type = other DNA
gtactgattggaacatccgcgaaatgat

SEQ ID NO: 594 - DNA, 23 bp, synthetic construct
  misc_feature 1..23: note = Description of Artificial Sequence: Synthetic oligonucleotide
  source 1..23: mol_type = other DNA
gtctgaagccatcgcttcctcct

SEQ ID NO: 595 - DNA, 29 bp, synthetic construct
  misc_feature 1..29: note = Description of Artificial Sequence: Synthetic oligonucleotide
  source 1..29: mol_type = other DNA
gtctgaagccatcgcttcctcctgaaaat

SEQ ID NO: 596 - DNA, 21 bp, synthetic construct
  misc_feature 1..21: note = Description of Artificial Sequence: Synthetic oligonucleotide
  source 1..21: mol_type = other DNA
ggttttcgctccgaaggtaaa

SEQ ID NO: 597 - DNA, 27 bp, synthetic construct
  misc_feature 1..27: note = Description of Artificial Sequence: Synthetic oligonucleotide
  source 1..27: mol_type = other DNA
ggttttcgctccgaaggtaaaagaaat

SEQ ID NO: 598 - DNA, 21 bp, synthetic construct
  misc_feature 1..21: note = Description of Artificial Sequence: Synthetic oligonucleotide
  source 1..21: mol_type = other DNA
gggactccccaagccctatta

SEQ ID NO: 599 - DNA, 27 bp, synthetic construct
  misc_feature 1..27: note = Description of Artificial Sequence: Synthetic oligonucleotide
  source 1..27: mol_type = other DNA
gggactccccaagccctattaaaaaat

SEQ ID NO: 600 - DNA, 22 bp, synthetic construct
  misc_feature 1..22: note = Description of Artificial Sequence: Synthetic oligonucleotide
  source 1..22: mol_type = other DNA
gcagcttgtttcacctcggtgc

SEQ ID NO: 601 - DNA, 28 bp, synthetic construct
  misc_feature 1..28: note = Description of Artificial Sequence: Synthetic oligonucleotide
  source 1..28: mol_type = other DNA
gcagcttgtttcacctcggtgcagagat

SEQ ID NO: 602 - DNA, 22 bp, synthetic construct
  misc_feature 1..22: note = Description of Artificial Sequence: Synthetic oligonucleotide
  source 1..22: mol_type = other DNA
gacctgtcttggttttcgctcc

SEQ ID NO: 603 - DNA, 28 bp, synthetic construct
  misc_feature 1..28: note = Description of Artificial Sequence: Synthetic oligonucleotide
  source 1..28: mol_type = other DNA
gacctgtcttggttttcgctccgaaggt

SEQ ID NO: 604 - DNA, 23 bp, synthetic construct
  misc_feature 1..23: note = Description of Artificial Sequence: Synthetic oligonucleotide
  source 1..23: mol_type = other DNA
gcttccatctgattagtaagtaa

SEQ ID NO: 605 - DNA, 29 bp, synthetic construct
  misc_feature 1..29: note = Description of Artificial Sequence: Synthetic oligonucleotide
  source 1..29: mol_type = other DNA
gcttccatctgattagtaagtaatccaat

SEQ ID NO: 606 - DNA, 22 bp, synthetic construct
  misc_feature 1..22: note = Description of Artificial Sequence: Synthetic oligonucleotide
  source 1..22: mol_type = other DNA
gtgcagagatgcctcggtgcct

SEQ ID NO: 607 - DNA, 28 bp, synthetic construct
  misc_feature 1..28: note = Description of Artificial Sequence: Synthetic oligonucleotide
  source 1..28: mol_type = other DNA
gtgcagagatgcctcggtgcctgccagt

SEQ ID NO: 608 - DNA, 21 bp, synthetic construct
  misc_feature 1..21: note = Description of Artificial Sequence: Synthetic oligonucleotide
  source 1..21: mol_type = other DNA
gagggtgcattttcaggagga

SEQ ID NO: 609 - DNA, 27 bp, synthetic construct
  misc_feature 1..27: note = Description of Artificial Sequence: Synthetic oligonucleotide
  source 1..27: mol_type = other DNA
gagggtgcattttcaggaggaagcgat

SEQ ID NO: 610 - DNA, 23 bp, synthetic construct
  misc_feature 1..23: note = Description of Artificial Sequence: Synthetic oligonucleotide
  source 1..23: mol_type = other DNA
gtttcacctcggtgcagagatgc

SEQ ID NO: 611 - DNA, 29 bp, synthetic construct
  misc_feature 1..29: note = Description of Artificial Sequence: Synthetic oligonucleotide
  source 1..29: mol_type = other DNA
gtttcacctcggtgcagagatgcctcggt

SEQ ID NO: 612 - DNA, 22 bp, synthetic construct
  misc_feature 1..22: note = Description of Artificial Sequence: Synthetic oligonucleotide
  source 1..22: mol_type = other DNA
gcgatggcttcagacagcatat

SEQ ID NO: 613 - DNA, 28 bp, synthetic construct
  misc_feature 1..28: note = Description of Artificial Sequence: Synthetic oligonucleotide
  source 1..28: mol_type = other DNA
gcgatggcttcagacagcatatttgagt

SEQ ID NO: 614 - DNA, 22 bp, synthetic construct
  misc_feature 1..22: note = Description of Artificial Sequence: Synthetic oligonucleotide
  source 1..22: mol_type = other DNA
gctccgaaggtaaaagaaatca

SEQ ID NO: 615 - DNA, 28 bp, synthetic construct
  misc_feature 1..28: note = Description of Artificial Sequence: Synthetic oligonucleotide
  source 1..28: mol_type = other DNA
gctccgaaggtaaaagaaatcattgagt

SEQ ID NO: 616 - DNA, 22 bp, synthetic construct
  misc_feature 1..22: note = Description of Artificial Sequence: Synthetic oligonucleotide
  source 1..22: mol_type = other DNA
gaggcatatgattacaagtcta

SEQ ID NO: 617 - DNA, 28 bp, synthetic construct
  misc_feature 1..28: note = Description of Artificial Sequence: Synthetic oligonucleotide
  source 1..28: mol_type = other DNA
gaggcatatgattacaagtctattggat

SEQ ID NO: 618 - DNA, 21 bp, synthetic construct
  misc_feature 1..21: note = Description of Artificial Sequence: Synthetic oligonucleotide
  source 1..21: mol_type = other DNA
gaaagagagatgtagggctag

SEQ ID NO: 619 - DNA, 27 bp, synthetic construct
  misc_feature 1..27: note = Description of Artificial Sequence: Synthetic oligonucleotide
  source 1..27: mol_type = other DNA
gaaagagagatgtagggctagaggggt

SEQ ID NO: 620 - DNA, 23 bp, synthetic construct
  misc_feature 1..23: note = Description of Artificial Sequence: Synthetic oligonucleotide
  source 1..23: mol_type = other DNA
gtactcacctctcatgaagcact

SEQ ID NO: 621 - DNA, 29 bp, synthetic construct
  misc_feature 1..29: note = Description of Artificial Sequence: Synthetic oligonucleotide
  source 1..29: mol_type = other DNA
gtactcacctctcatgaagcactgtgggt

SEQ ID NO: 622 - DNA, 21 bp, synthetic construct
  misc_feature 1..21: note = Description of Artificial Sequence: Synthetic oligonucleotide
  source 1..21: mol_type = other DNA
gaggtgagtacatgctggtct

SEQ ID NO: 623 - DNA, 27 bp, synthetic construct
  misc_feature 1..27: note = Description of Artificial Sequence: Synthetic oligonucleotide
  source 1..27: mol_type = other DNA
gaggtgagtacatgctggtcttgtaat

SEQ ID NO: 624 - DNA, 22 bp, synthetic construct
  misc_feature 1..22: note = Description of Artificial Sequence: Synthetic oligonucleotide
  source 1..22: mol_type = other DNA
gagaggaattcaaactgaggca

SEQ ID NO: 625 - DNA, 28 bp, synthetic construct
  misc_feature 1..28: note = Description of Artificial Sequence: Synthetic oligonucleotide
  source 1..28: mol_type = other DNA
gagaggaattcaaactgaggcatatgat

SEQ ID NO: 626 - DNA, 21 bp, synthetic construct
  misc_feature 1..21: note = Description of Artificial Sequence: Synthetic oligonucleotide
  source 1..21: mol_type = other DNA
gaggctgaaacagtgacctgt

SEQ ID NO: 627 - DNA, 27 bp, synthetic construct
  misc_feature 1..27: note = Description of Artificial Sequence: Synthetic oligonucleotide
  source 1..27: mol_type = other DNA
gaggctgaaacagtgacctgtcttggt

SEQ ID NO: 628 - DNA, 21 bp, synthetic construct
  misc_feature 1..21: note = Description of Artificial Sequence: Synthetic oligonucleotide
  source 1..21: mol_type = other DNA
gtacatgaagcaactccagtc

SEQ ID NO: 629 - DNA, 27 bp, synthetic construct
  misc_feature 1..27: note = Description of Artificial Sequence: Synthetic oligonucleotide
  source 1..27: mol_type = other DNA
gtacatgaagcaactccagtcccaaat

SEQ ID NO: 630 - DNA, 21 bp, synthetic construct
  misc_feature 1..21: note = Description of Artificial Sequence: Synthetic oligonucleotide
  source 1..21: mol_type = other DNA
gacgggtggggagagggacac

SEQ ID NO: 631 - DNA, 27 bp, synthetic construct
  misc_feature 1..27: note = Description of Artificial Sequence: Synthetic oligonucleotide
  source 1..27: mol_type = other DNA
gacgggtggggagagggacacacagat

SEQ ID NO: 632 - DNA, 22 bp, synthetic construct
  misc_feature 1..22: note = Description of Artificial Sequence: Synthetic oligonucleotide
  source 1..22: mol_type = other DNA
gtcccaaatatgtagctgtttg

SEQ ID NO: 633 - DNA, 28 bp, synthetic construct
  misc_feature 1..28: note = Description of Artificial Sequence: Synthetic oligonucleotide
  source 1..28: mol_type = other DNA
gtcccaaatatgtagctgtttgggaggt

SEQ ID NO: 634 - DNA, 21 bp, synthetic construct
  misc_feature 1..21: note = Description of Artificial Sequence: Synthetic oligonucleotide
  source 1..21: mol_type = other DNA
ggccaggggtcactccaggat

SEQ ID NO: 635 - DNA, 27 bp, synthetic construct
  misc_feature 1..27: note = Description of Artificial Sequence: Synthetic oligonucleotide
  source 1..27: mol_type = other DNA
ggccaggggtcactccaggattccaat

SEQ ID NO: 636 - DNA, 22 bp, synthetic construct
  misc_feature 1..22: note = Description of Artificial Sequence: Synthetic oligonucleotide
  source 1..22: mol_type = other DNA
gccagagccggggtgtgcagac

SEQ ID NO: 637 - DNA, 28 bp, synthetic construct
  misc_feature 1..28: note = Description of Artificial Sequence: Synthetic oligonucleotide
  source 1..28: mol_type = other DNA
gccagagccggggtgtgcagacggcagt

SEQ ID NO: 638 - DNA, 22 bp, synthetic construct
  misc_feature 1..22: note = Description of Artificial Sequence: Synthetic oligonucleotide
  source 1..22: mol_type = other DNA
gaggacgtgtgtgtctgtgtgg

SEQ ID NO: 639 - DNA, 28 bp, synthetic construct
  misc_feature 1..28: note = Description of Artificial Sequence: Synthetic oligonucleotide
  source 1..28: mol_type = other DNA
gaggacgtgtgtgtctgtgtgggtgagt

SEQ ID NO: 640 - DNA, 22 bp, synthetic construct
  misc_feature 1..22: note = Description of Artificial Sequence: Synthetic oligonucleotide
  source 1..22: mol_type = other DNA
gggagaaggccaggggtcactc

SEQ ID NO: 641 - DNA, 28 bp, synthetic construct
  misc_feature 1..28: note = Description of Artificial Sequence: Synthetic oligonucleotide
  source 1..28: mol_type = other DNA
gggagaaggccaggggtcactccaggat

SEQ ID NO: 642 - DNA, 21 bp, synthetic construct
  misc_feature 1..21: note = Description of Artificial Sequence: Synthetic oligonucleotide
  source 1..21: mol_type = other DNA
gggtgagtgagtgtgtgcgtg

SEQ ID NO: 643 - DNA, 27 bp, synthetic construct
  misc_feature 1..27: note = Description of Artificial Sequence: Synthetic oligonucleotide
  source 1..27: mol_type = other DNA
gggtgagtgagtgtgtgcgtgtggggt

SEQ ID NO: 644 - DNA, 22 bp, synthetic construct
  misc_feature 1..22: note = Description of Artificial Sequence: Synthetic oligonucleotide
  source 1..22: mol_type = other DNA
gagtgaggacgtgtgtgtctgt

SEQ ID NO: 645 - DNA, 28 bp, synthetic construct
  misc_feature 1..28: note = Description of Artificial Sequence: Synthetic oligonucleotide
  source 1..28: mol_type = other DNA
gagtgaggacgtgtgtgtctgtgtgggt

SEQ ID NO: 646 - DNA, 22 bp, synthetic construct
  misc_feature 1..22: note = Description of Artificial Sequence: Synthetic oligonucleotide
  source 1..22: mol_type = other DNA
gcgttggagcggggagaaggcc

SEQ ID NO: 647 - DNA, 28 bp, synthetic construct
  misc_feature 1..28: note = Description of Artificial Sequence: Synthetic oligonucleotide
  source 1..28: mol_type = other DNA
gcgttggagcggggagaaggccaggggt

SEQ ID NO: 648 - DNA, 21 bp, synthetic construct
  misc_feature 1..21: note = Description of Artificial Sequence: Synthetic oligonucleotide
  source 1..21: mol_type = other DNA
gctccattcacccagcttccc

SEQ ID NO: 649 - DNA, 27 bp, synthetic construct
  misc_feature 1..27: note = Description of Artificial Sequence: Synthetic oligonucleotide
  source 1..27: mol_type = other DNA
gctccattcacccagcttccctgtggt

SEQ ID NO: 650 - DNA, 21 bp, synthetic construct
  misc_feature 1..21: note = Description of Artificial Sequence: Synthetic oligonucleotide
  source 1..21: mol_type = other DNA
cccaagaagaagaggaaagtc

SEQ ID NO: 651 - DNA, 76 bp, synthetic construct
  misc_feature 1..76: note = Description of Artificial Sequence: Synthetic oligonucleotide
  source 1..76: mol_type = other DNA
gttttagagctagaaatagcaagttaaaataaggctagtccgttatcaacttgaaaaagtggcaccgagtcggtgc

SEQ ID NO: 652 - DNA, 20 bp, synthetic construct
  misc_feature 1..20: note = Description of Artificial Sequence: Synthetic oligonucleotide
  source 1..20: mol_type = other DNA
tccagatggcacattgtcag

SEQ ID NO: 653 - DNA, 20 bp, synthetic construct
  misc_feature 1..20: note = Description of Artificial Sequence: Synthetic oligonucleotide
  source 1..20: mol_type = other DNA
agggagcaggaaagtgaggt

SEQ ID NO: 654 - DNA, 21 bp, synthetic construct
  misc_feature 1..21: note = Description of Artificial Sequence: Synthetic oligonucleotide
  source 1..21: mol_type = other DNA
gtagttgccgtcgtccttgaa

SEQ ID NO: 655 - DNA, 27 bp, synthetic construct
  misc_feature 1..27: note = Description of Artificial Sequence: Synthetic oligonucleotide
  source 1..27: mol_type = other DNA
gtagttgccgtcgtccttgaagaagat

SEQ ID NO: 656 - DNA, 22 bp, synthetic construct
  misc_feature 1..22: note = Description of Artificial Sequence: Synthetic oligonucleotide
  source 1..22: mol_type = other DNA
gccacctacggcaagctgaccc

SEQ ID NO: 657 - DNA, 28 bp, synthetic construct
  misc_feature 1..28: note = Description of Artificial Sequence: Synthetic oligonucleotide
  source 1..28: mol_type = other DNA
gccacctacggcaagctgaccctgaagt

SEQ ID NO: 658 - DNA, 23 bp, synthetic construct
  misc_feature 1..23: note = Description of Artificial Sequence: Synthetic oligonucleotide
  source 1..23: mol_type = other DNA
gacggcaactacaagacccgcgc

SEQ ID NO: 659 - DNA, 29 bp, synthetic construct
  misc_feature 1..29: note = Description of Artificial Sequence: Synthetic oligonucleotide
  source 1..29: mol_type = other DNA
gacggcaactacaagacccgcgccgaggt

SEQ ID NO: 660 - DNA, 23 bp, synthetic construct
  misc_feature 1..23: note = Description of Artificial Sequence: Synthetic oligonucleotide
  source 1..23: mol_type = other DNA
gagtccgagcagaagaagaaggg

SEQ ID NO: 661 - DNA, 23 bp, synthetic construct
  misc_feature 1..23: note = Description of Artificial Sequence: Synthetic oligonucleotide
  source 1..23: mol_type = other DNA
gagttagagcagaagaagaaagg

SEQ ID NO: 662 - DNA, 23 bp, synthetic construct
  misc_feature 1..23: note = Description of Artificial Sequence: Synthetic oligonucleotide
  source 1..23: mol_type = other DNA
gagtctaagcagaagaagaagag

SEQ ID NO: 663 - DNA, 23 bp, synthetic construct
  misc_feature 1..23: note = Description of Artificial Sequence: Synthetic oligonucleotide
  source 1..23: mol_type = other DNA
gaggccgagcagaagaaagacgg

SEQ ID NO: 664 - DNA, 23 bp, synthetic construct
  misc_feature 1..23: note = Description of Artificial Sequence: Synthetic oligonucleotide
  source 1..23: mol_type = other DNA
gagtcctagcaggagaagaagag

SEQ ID NO: 665 - DNA, 23 bp, synthetic construct
  misc_feature 1..23: note = Description of Artificial Sequence: Synthetic oligonucleotide
  source 1..23: mol_type = other DNA
aagtctgagcacaagaagaatgg

SEQ ID NO: 666 - DNA, 23 bp, synthetic construct
  misc_feature 1..23: note = Description of Artificial Sequence: Synthetic oligonucleotide
  source 1..23: mol_type = other DNA
gagtccgggaaggagaagaaagg

SEQ ID NO: 667 - DNA, 23 bp, synthetic construct
  misc_feature 1..23: note = Description of Artificial Sequence: Synthetic oligonucleotide
  source 1..23: mol_type = other DNA
gaatccaagcaggagaagaagga

SEQ ID NO: 668 - DNA, 23 bp, synthetic construct
  misc_feature 1..23: note = Description of Artificial Sequence: Synthetic oligonucleotide
  source 1..23: mol_type = other DNA
acgtctgagcagaagaagaatgg

SEQ ID NO: 669 - DNA, 23 bp, synthetic construct
  misc_feature 1..23: note = Description of Artificial Sequence: Synthetic oligonucleotide
  source 1..23: mol_type = other DNA
ggtgagtgagtgtgtgcgtgtgg

SEQ ID NO: 670 - DNA, 23 bp, synthetic construct
  misc_feature 1..23: note = Description of Artificial Sequence: Synthetic oligonucleotide
  source 1..23: mol_type = other DNA
agtgagtgagtgtgtgtgtgggg

SEQ ID NO: 671 - DNA, 23 bp, synthetic construct
  misc_feature 1..23: note = Description of Artificial Sequence: Synthetic oligonucleotide
  source 1..23: mol_type = other DNA
agagagtgagtgtgtgcatgagg

SEQ ID NO: 672 - DNA, 23 bp, synthetic construct
  misc_feature 1..23: note = Description of Artificial Sequence: Synthetic oligonucleotide
  source 1..23: mol_type = other DNA
tgtgggtgagtgtgtgcgtgagg

SEQ ID NO: 673 - DNA, 23 bp, synthetic construct
  misc_feature 1..23: note = Description of Artificial Sequence: Synthetic oligonucleotide
  source 1..23: mol_type = other DNA
gctgagtgagtgtatgcgtgtgg

SEQ ID NO: 674 - DNA, 23 bp, synthetic construct
  misc_feature 1..23: note = Description of Artificial Sequence: Synthetic oligonucleotide
  source 1..23: mol_type = other DNA
tgtgggtgagtgtgtgcgtgaga

SEQ ID NO: 675 - DNA, 23 bp, synthetic construct
  misc_feature 1..23: note = Description of Artificial Sequence: Synthetic oligonucleotide
  source 1..23: mol_type = other DNA
tgtgagtgagtgtgtgcgtgtga

SEQ ID NO: 676 - DNA, 23 bp, synthetic construct
  misc_feature 1..23: note = Description of Artificial Sequence: Synthetic oligonucleotide
  source 1..23: mol_type = other DNA
ggtgagtgagtgcgtgcgggtgg

SEQ ID NO: 677 - DNA, 23 bp, synthetic construct
  misc_feature 1..23: note = Description of Artificial Sequence: Synthetic oligonucleotide
  source 1..23: mol_type = other DNA
agtgtgtgagtgtgtgcgtgtgg

SEQ ID NO: 678 - DNA, 23 bp, synthetic construct
  misc_feature 1..23: note = Description of Artificial Sequence: Synthetic oligonucleotide
  source 1..23: mol_type = other DNA
actgtgtgagtgtgtgcgtgagg

SEQ ID NO: 679 - DNA, 23 bp, synthetic construct
  misc_feature 1..23: note = Description of Artificial Sequence: Synthetic oligonucleotide
  source 1..23: mol_type = other DNA
gaccccctccaccccgcctccgg

SEQ ID NO: 680 - DNA, 23 bp, synthetic construct
  misc_feature 1..23: note = Description of Artificial Sequence: Synthetic oligonucleotide
  source 1..23: mol_type = other DNA
attcccccccaccccgcctcagg

SEQ ID NO: 681 - DNA, 23 bp, synthetic construct
  misc_feature 1..23: note = Description of Artificial Sequence: Synthetic oligonucleotide
  source 1..23: mol_type = other DNA
acacccccccaccccgcctcagg

SEQ ID NO: 682 - DNA, 23 bp, synthetic construct
  misc_feature 1..23: note = Description of Artificial Sequence: Synthetic oligonucleotide
  source 1..23: mol_type = other DNA
gggcccctccaccccgcctctgg

SEQ ID NO: 683 - DNA, 23 bp, synthetic construct
  misc_feature 1..23: note = Description of Artificial Sequence: Synthetic oligonucleotide
  source 1..23: mol_type = other DNA
cgccctccccaccccgcctccgg

SEQ ID NO: 684 - DNA, 23 bp, synthetic construct
  misc_feature 1..23: note = Description of Artificial Sequence: Synthetic oligonucleotide
  source 1..23: mol_type = other DNA
gaccccccccaccccgcccccgg

SEQ ID NO: 685 - DNA, 23 bp, synthetic construct
  misc_feature 1..23: note = Description of Artificial Sequence: Synthetic oligonucleotide
  source 1..23: mol_type = other DNA
gcccccacccaccccgcctctgg

SEQ ID NO: 686 - DNA, 23 bp, synthetic construct
  misc_feature 1..23: note = Description of Artificial Sequence: Synthetic oligonucleotide
  source 1..23: mol_type = other DNA
ctccccacccaccccgcctcagg

SEQ ID NO: 687 - DNA, 23 bp, synthetic construct
  misc_feature 1..23: note = Description of Artificial Sequence: Synthetic oligonucleotide
  source 1..23: mol_type = other DNA
tgcccctcccaccccgcctctgg

SEQ ID NO: 688 - DNA, 23 bp, synthetic construct
  misc_feature 1..23: note = Description of Artificial Sequence: Synthetic oligonucleotide
  source 1..23: mol_type = other DNA
gggcacgggcagcttgcccgtga

SEQ ID NO: 689 - DNA, 26 bp, synthetic construct
  misc_feature 1..26: note = Description of Artificial Sequence: Synthetic oligonucleotide
  source 1..26: mol_type = other DNA
gggcacgggcagcttgcccgnnnnnn

SEQ ID NO: 690 - DNA, 26 bp, synthetic construct
  misc_feature 1..26: note = Description of Artificial Sequence: Synthetic oligonucleotide
  source 1..26: mol_type = other DNA
gtcgccctcgaacttcacctnnnnnn

SEQ ID NO: 691 - DNA, 24 bp, synthetic construct
  misc_feature 1..24: note = Description of Artificial Sequence: Synthetic oligonucleotide
  source 1..24: mol_type = other DNA
gccacgaagcaggccaatggggag

SEQ ID NO: 692 - DNA, 24 bp, synthetic construct
  misc_feature 1..24: note = Description of Artificial Sequence: Synthetic oligonucleotide
  source 1..24: mol_type = other DNA
gccacacagcaggtcaatggggaa

SEQ ID NO: 693 - DNA, 24 bp, synthetic construct
  misc_feature 1..24: note = Description of Artificial Sequence: Synthetic oligonucleotide
  source 1..24: mol_type = other DNA
gaatcccttctgcagcacctggat

SEQ ID NO: 694 - DNA, 24 bp, synthetic construct
  misc_feature 1..24: note = Description of Artificial Sequence: Synthetic oligonucleotide
  source 1..24: mol_type = other DNA
caatacctactgcagcacctagag

SEQ ID NO: 695 - DNA, 24 bp, synthetic construct
  misc_feature 1..24: note = Description of Artificial Sequence: Synthetic oligonucleotide
  source 1..24: mol_type = other DNA
ctgtcccctccacagcacctggag

SEQ ID NO: 696 - DNA, 24 bp, synthetic construct
  misc_feature 1..24: note = Description of Artificial Sequence: Synthetic oligonucleotide
  source 1..24: mol_type = other DNA
aaatcccttccgcagcacctaggt

SEQ ID NO: 697 - DNA, 24 bp, synthetic construct
  misc_feature 1..24: note = Description of Artificial Sequence: Synthetic oligonucleotide
  source 1..24: mol_type = other DNA
taatcccttccacagtacctagaa

SEQ ID NO: 698 - DNA, 24 bp, synthetic construct
  misc_feature 1..24: note = Description of Artificial Sequence: Synthetic oligonucleotide
  source 1..24: mol_type = other DNA
gaaccccttctacagcacctcggc

SEQ ID NO: 699 - DNA, 24 bp, synthetic construct
  misc_feature 1..24: note = Description of Artificial Sequence: Synthetic oligonucleotide
  source 1..24: mol_type = other DNA
ttatcccttctccagcacctagaa

SEQ ID NO: 700 - DNA, 24 bp, synthetic construct
  misc_feature 1..24: note = Description of Artificial Sequence: Synthetic oligonucleotide
  source 1..24: mol_type = other DNA
gcggcggctgcacaaccagtggag

SEQ ID NO: 701 - DNA, 25 bp, synthetic construct
  misc_feature 1..25: note = Description of Artificial Sequence: Synthetic oligonucleotide
  source 1..25: mol_type = other DNA
tatgcggctgcacagccagtgggag

SEQ ID NO: 702 - DNA, 24 bp, synthetic construct
  misc_feature 1..24: note = Description of Artificial Sequence: Synthetic oligonucleotide
  source 1..24: mol_type = other DNA
gtgggggccacacaaccagttgag

SEQ ID NO: 703 - DNA, 24 bp, synthetic construct
  misc_feature 1..24: note = Description of Artificial Sequence: Synthetic oligonucleotide
  source 1..24: mol_type = other DNA
ggttgtgcagccgccgctccagag

SEQ ID NO: 704 - DNA, 24 bp, synthetic construct
  misc_feature 1..24: note = Description of Artificial Sequence: Synthetic oligonucleotide
  source 1..24: mol_type = other DNA
ggtgcattttcaggaggaagcgat

SEQ ID NO: 705 - DNA, 24 bp, synthetic construct
  misc_feature 1..24: note = Description of Artificial Sequence: Synthetic oligonucleotide
  source 1..24: mol_type = other DNA
ggtccattttcaggaggaagagtg

SEQ ID NO: 706 - DNA, 24 bp, synthetic construct
  misc_feature 1..24: note = Description of Artificial Sequence: Synthetic oligonucleotide
  source 1..24: mol_type = other DNA
actgcattttcaggaggaacagag

SEQ ID NO: 707 - DNA, 25 bp, synthetic construct
  misc_feature 1..25: note = Description of Artificial Sequence: Synthetic oligonucleotide
  source 1..25: mol_type = other DNA
gatgcatttccaggaggaaggagag

SEQ ID NO: 708 - DNA, 24 bp, synthetic construct
  misc_feature 1..24: note = Description of Artificial Sequence: Synthetic oligonucleotide
  source 1..24: mol_type = other DNA
aatgcattttcagaaggaagtgat

SEQ ID NO: 709 - DNA, 24 bp, synthetic construct
  misc_feature 1..24: note = Description of Artificial Sequence: Synthetic oligonucleotide
  source 1..24: mol_type = other DNA
agtgcatcatcaggaggaagggaa

SEQ ID NO: 710 - DNA, 24 bp, synthetic construct
  misc_feature 1..24: note = Description of Artificial Sequence: Synthetic oligonucleotide
  source 1..24: mol_type = other DNA
gacgcatcttcaagaggaagtgaa

SEQ ID NO: 711 - DNA, 24 bp, synthetic construct
  misc_feature 1..24: note = Description of Artificial Sequence: Synthetic oligonucleotide
  source 1..24: mol_type = other DNA
gctgcatgtccaggaggaagggag

SEQ ID NO: 712 - DNA, 24 bp, synthetic construct
  misc_feature 1..24: note = Description of Artificial Sequence: Synthetic oligonucleotide
  source 1..24: mol_type = other DNA
ggtccatgttcaggaggaaaggag

SEQ ID NO: 713 - DNA, 24 bp, synthetic construct
  misc_feature 1..24: note = Description of Artificial Sequence: Synthetic oligonucleotide
  source 1..24: mol_type = other DNA
ggtccatttccaggagaaagggag

SEQ ID NO: 714 - DNA, 24 bp, synthetic construct
  misc_feature 1..24: note = Description of Artificial Sequence: Synthetic oligonucleotide
  source 1..24: mol_type = other DNA
ggtgcactcacaggaggaaatgag

SEQ ID NO: 715 - DNA, 24 bp, synthetic construct
  misc_feature 1..24: note = Description of Artificial Sequence: Synthetic oligonucleotide
  source 1..24: mol_type = other DNA
gtgatatagggctagaggagagaa

SEQ ID NO: 716 - DNA, 24 bp, synthetic construct
  misc_feature 1..24: note = Description of Artificial Sequence: Synthetic oligonucleotide
  source 1..24: mol_type = other DNA
gagctgcagggctagagggaggag

SEQ ID NO: 717 - DNA, 24 bp, synthetic construct
  misc_feature 1..24: note = Description of Artificial Sequence: Synthetic oligonucleotide
  source 1..24: mol_type = other DNA
gagatgtagggctagaggggtgag

SEQ ID NO: 718 - DNA, 25 bp, synthetic construct
  misc_feature 1..25: note = Description of Artificial Sequence: Synthetic oligonucleotide
  source 1..25: mol_type = other DNA
gagatgtagggagagagggagagag

SEQ ID NO: 719 - DNA, 24 bp, synthetic construct
  misc_feature 1..24: note = Description of Artificial Sequence: Synthetic oligonucleotide
  source 1..24: mol_type = other DNA
tgagagtagggctagaggagggag

SEQ ID NO: 720 - DNA, 24 bp, synthetic construct
  misc_feature 1..24: note = Description of Artificial Sequence: Synthetic oligonucleotide
  source 1..24: mol_type = other DNA
gagatgttgggccagaggggagaa

SEQ ID NO: 721 - DNA, 24 bp, synthetic construct
  misc_feature 1..24: note = Description of Artificial Sequence: Synthetic oligonucleotide
  source 1..24: mol_type = other DNA
gagatgaaaggcaagaggggagag

SEQ ID NO: 722 - DNA, 24 bp, synthetic construct
  misc_feature 1..24: note = Description of Artificial Sequence: Synthetic oligonucleotide
  source 1..24: mol_type = other DNA
agagtgtaggaccagaggggtggg

SEQ ID NO: 723 - DNA, 24 bp, synthetic construct
  misc_feature 1..24: note = Description of Artificial Sequence: Synthetic oligonucleotide
  source 1..24: mol_type = other DNA
ttagtgtagggccagagagggaag

SEQ ID NO: 724 - DNA, 24 bp, synthetic construct
  misc_feature 1..24: note = Description of Artificial Sequence: Synthetic oligonucleotide
  source 1..24: mol_type = other DNA
gagatggagggcaagaggggagaa

SEQ ID NO: 725 - DNA, 24 bp, synthetic construct
  misc_feature 1..24: note = Description of Artificial Sequence: Synthetic oligonucleotide
  source 1..24: mol_type = other DNA
gaaatgtaggtctagagaggggac

SEQ ID NO: 726 - DNA, 24 bp, synthetic construct
  misc_feature 1..24: note = Description of Artificial Sequence: Synthetic oligonucleotide
  source 1..24: mol_type = other DNA
aagatgtatgactagagggaggga

SEQ ID NO: 727 - DNA, 24 bp, synthetic construct
  misc_feature 1..24: note = Description of Artificial Sequence: Synthetic oligonucleotide
  source 1..24: mol_type = other DNA
gagctgtagggccaaagggaggag

SEQ ID NO: 728 - DNA, 24 bp, synthetic construct
  misc_feature 1..24: note = Description of Artificial Sequence: Synthetic oligonucleotide
  source 1..24: mol_type = other DNA
gagatatagggcaagaggaaggag

SEQ ID NO: 729 - DNA, 24 bp, synthetic construct
  misc_feature 1..24: note = Description of Artificial Sequence: Synthetic oligonucleotide
  source 1..24: mol_type = other DNA
aaagtgcaggactaaaggggtgag

SEQ ID NO: 730 - DNA, 24 bp, synthetic construct
  misc_feature 1..24: note = Description of Artificial Sequence: Synthetic oligonucleotide
  source 1..24: mol_type = other DNA
ctgatgtggggctggaggggtgag

SEQ ID NO: 731 - DNA, 24 bp, synthetic construct
  misc_feature 1..24: note = Description of Artificial Sequence: Synthetic oligonucleotide
  source 1..24: mol_type = other DNA
aagtggtaggattagaggggtgag

SEQ ID NO: 732 - DNA, 24 bp, synthetic construct
  misc_feature 1..24: note = Description of Artificial Sequence: Synthetic oligonucleotide
  source 1..24: mol_type = other DNA
actgtgtaggcctagagaggtgag

SEQ ID NO: 733 - DNA, 24 bp, synthetic construct
  misc_feature 1..24: note = Description of Artificial Sequence: Synthetic oligonucleotide
  source 1..24: mol_type = other DNA
gagatgtagttctagagggagagg

SEQ ID NO: 734 - DNA, 24 bp, synthetic construct
  misc_feature 1..24: note = Description of Artificial Sequence: Synthetic oligonucleotide
  source 1..24: mol_type = other DNA
gtgatgtagaactagaggggtggg

SEQ ID NO: 735 - DNA, 24 bp, synthetic construct
  misc_feature 1..24: note = Description of Artificial Sequence: Synthetic oligonucleotide
  source 1..24: mol_type = other DNA
gagttggaggcctagagaggggag

SEQ ID NO: 736 - DNA, 24 bp, synthetic construct
  misc_feature 1..24: note = Description of Artificial Sequence: Synthetic oligonucleotide
  source 1..24: mol_type = other DNA
gatgagtagggctagaagggggag

SEQ ID NO: 737 - DNA, 24 bp, synthetic construct
  misc_feature 1..24: note = Description of Artificial Sequence: Synthetic oligonucleotide
  source 1..24: mol_type = other DNA
aagatgaaggaatagaggggaaag

SEQ ID NO: 738 - DNA, 24 bp, synthetic construct
  misc_feature 1..24: note = Description of Artificial Sequence: Synthetic oligonucleotide
  source 1..24: mol_type = other DNA
gggatggggggctagaggagggag

SEQ ID NO: 739 - DNA, 24 bp, synthetic construct
  misc_feature 1..24: note = Description of Artificial Sequence: Synthetic oligonucleotide
  source 1..24: mol_type = other DNA
gtggtatagggctagaggggagat

SEQ ID NO: 740 - DNA, 24 bp, synthetic construct
  misc_feature 1..24: note = Description of Artificial Sequence: Synthetic oligonucleotide
  source 1..24: mol_type = other DNA
gaggtgcggggcaaggggagggag

SEQ ID NO: 741 - DNA, 24 bp, synthetic construct
  misc_feature 1..24: note = Description of Artificial Sequence: Synthetic oligonucleotide
  source 1..24: mol_type = other DNA
gatatgtagggccaaagggaagag

SEQ ID NO: 742 - DNA, 24 bp, synthetic construct
  misc_feature 1..24: note = Description of Artificial Sequence: Synthetic oligonucleotide
  source 1..24: mol_type = other DNA
gtgatgtggggctagagagtagaa

SEQ ID NO: 743 - DNA, 24 bp, synthetic construct
  misc_feature 1..24: note = Description of Artificial Sequence: Synthetic oligonucleotide
  source 1..24: mol_type = other DNA
ggaatgtagggccagagagaggag

SEQ ID NO: 744 - DNA, 24 bp, synthetic construct
  misc_feature 1..24: note = Description of Artificial Sequence: Synthetic oligonucleotide
  source 1..24: mol_type = other DNA
atgatgtaggtcaagaggggtgaa

SEQ ID NO: 745 - DNA, 24 bp, synthetic construct
  misc_feature 1..24: note = Description of Artificial Sequence: Synthetic oligonucleotide
  source 1..24: mol_type = other DNA
tggatgtaggagtagagggtagag

SEQ ID NO: 746 - DNA, 24 bp, synthetic construct
  misc_feature 1..24: note = Description of Artificial Sequence: Synthetic oligonucleotide
  source 1..24: mol_type = other DNA
gagaagcagggctagaggaggagg

SEQ ID NO: 747 - DNA, 24 bp, synthetic construct
  misc_feature 1..24: note = Description of Artificial Sequence: Synthetic oligonucleotide
  source 1..24: mol_type = other DNA
aagatgaagggctaggggtgagag

SEQ ID NO: 748 - DNA, 24 bp, synthetic construct
  misc_feature 1..24: note = Description of Artificial Sequence: Synthetic oligonucleotide
  source 1..24: mol_type = other DNA
gagatataaggctggaggggtaag

SEQ ID NO: 749 - DNA, 24 bp, synthetic construct
  misc_feature 1..24: note = Description of Artificial Sequence: Synthetic oligonucleotide
  source 1..24: mol_type = other DNA
aagatacagggagagaggggagag

SEQ ID NO: 750 - DNA, 24 bp, synthetic construct
  misc_feature 1..24: note = Description of Artificial Sequence: Synthetic oligonucleotide
  source 1..24: mol_type = other DNA
gaggactagggctagagggagggt

SEQ ID NO: 751 - DNA, 24 bp, synthetic construct
  misc_feature 1..24: note = Description of Artificial Sequence: Synthetic oligonucleotide
  source 1..24: mol_type = other DNA
cagatgtagggctggggggagagg

SEQ ID NO: 752 - DNA, 24 bp, synthetic construct
  misc_feature 1..24: note = Description of Artificial Sequence: Synthetic oligonucleotide
  source 1..24: mol_type = other DNA
cagatgtagggctaaaatggggag

SEQ ID NO: 753 - DNA, 24 bp, synthetic construct
  misc_feature 1..24: note = Description of Artificial Sequence: Synthetic oligonucleotide
  source 1..24: mol_type = other DNA
agtatataggtctagaggggagag

SEQ ID NO: 754 - DNA, 24 bp, synthetic construct
  misc_feature 1..24: note = Description of Artificial Sequence: Synthetic oligonucleotide
  source 1..24: mol_type = other DNA
aatatgtagggaaagaggggggaa

SEQ ID NO: 755 - DNA, 24 bp, synthetic construct
  misc_feature 1..24: note = Description of Artificial Sequence: Synthetic oligonucleotide
  source 1..24: mol_type = other DNA
gagaggtagggatagaggggagta

SEQ ID NO: 756 - DNA, 24 bp, synthetic construct
  misc_feature 1..24: note = Description of Artificial Sequence: Synthetic oligonucleotide
  source 1..24: mol_type = other DNA
gaggagtaggggtagaggggtgat

SEQ ID NO: 757 - DNA, 24 bp, synthetic construct
  misc_feature 1..24: note = Description of Artificial Sequence: Synthetic oligonucleotide
  source 1..24: mol_type = other DNA
aagatgcagagcaagaggggggaa

SEQ ID NO: 758 - DNA, 24 bp, synthetic construct
  misc_feature 1..24: note = Description of Artificial Sequence: Synthetic oligonucleotide
  source 1..24: mol_type = other DNA
aagatgcaggggtagaggggtggg

SEQ ID NO: 759 - DNA, 24 bp, synthetic construct
  misc_feature 1..24: note = Description of Artificial Sequence: Synthetic oligonucleotide
  source 1..24: mol_type = other DNA
aagctgtagggccagatgggagag

SEQ ID NO: 760 - DNA, 24 bp, synthetic construct
  misc_feature 1..24: note = Description of Artificial Sequence: Synthetic oligonucleotide
  source 1..24: mol_type = other DNA
gagctgcagggctaggggggtgag

SEQ ID NO: 761 - DNA, 25 bp, synthetic construct
  misc_feature 1..25: note = Description of Artificial Sequence: Synthetic oligonucleotide
  source 1..25: mol_type = other DNA
gagatgtaggaccagagggagggac

SEQ ID NO: 762 - DNA, 24 bp, synthetic construct
  misc_feature 1..24: note = Description of Artificial Sequence: Synthetic oligonucleotide
  source 1..24: mol_type = other DNA
aagatgtcaggccagaggggtaag

SEQ ID NO: 763 - DNA, 24 bp, synthetic construct
  misc_feature 1..24: note = Description of Artificial Sequence: Synthetic oligonucleotide
  source 1..24: mol_type = other DNA
gagatgttgggccagaggggagaa

SEQ ID NO: 764 - DNA, 24 bp, synthetic construct
  misc_feature 1..24: note = Description of Artificial Sequence: Synthetic oligonucleotide
  source 1..24: mol_type = other DNA
gggttgcagggccagagggggagg

SEQ ID NO: 765 - DNA, 24 bp, synthetic construct
  misc_feature 1..24: note = Description of Artificial Sequence: Synthetic oligonucleotide
  source 1..24: mol_type = other DNA
gagatgttgggatagagggggaaa

SEQ ID NO: 766 - DNA, 24 bp, synthetic construct
  misc_feature 1..24: note = Description of Artificial Sequence: Synthetic oligonucleotide
  source 1..24: mol_type = other DNA
gaggggtaggactagagggggaaa

SEQ ID NO: 767 - DNA, 24 bp, synthetic construct
  misc_feature 1..24: note = Description of Artificial Sequence: Synthetic oligonucleotide
  source 1..24: mol_type = other DNA
gggatgtagggctagggggaagac

SEQ ID NO: 768 - DNA, 24 bp, synthetic construct
  misc_feature 1..24: note = Description of Artificial Sequence: Synthetic oligonucleotide
  source 1..24: mol_type = other DNA
gagatgaagtactagaagggagag

SEQ ID NO: 769 - DNA, 25 bp, synthetic construct
  misc_feature 1..25: note = Description of Artificial Sequence: Synthetic oligonucleotide
  source 1..25: mol_type = other DNA
cagatgtaggattagagggagagaa

SEQ ID NO: 770 - DNA, 24 bp, synthetic construct
  misc_feature 1..24: note = Description of Artificial Sequence: Synthetic oligonucleotide
  source 1..24: mol_type = other DNA
gaggtgtggggctggagggggaag

SEQ ID NO: 771 - DNA, 24 bp, synthetic construct
  misc_feature 1..24: note = Description of Artificial Sequence: Synthetic oligonucleotide
  source 1..24: mol_type = other DNA
gagaggtagggctggaggggagct

SEQ ID NO: 772 - DNA, 24 bp, synthetic construct
  misc_feature 1..24: note = Description of Artificial Sequence: Synthetic oligonucleotide
  source 1..24: mol_type = other DNA
gcgagcagcgtcttcgagagtgag

SEQ ID NO: 773 - DNA, 24 bp, synthetic construct
  misc_feature 1..24: note = Description of Artificial Sequence: Synthetic oligonucleotide
  source 1..24: mol_type = other DNA
ctgtggcaagagcttcagccagag

SEQ ID NO: 774 - DNA, 24 bp, synthetic construct
  misc_feature 1..24: note = Description of Artificial Sequence: Synthetic oligonucleotide
  source 1..24: mol_type = other DNA
gtgcggcaagagcttcagccagag

SEQ ID NO: 775 - DNA, 24 bp, synthetic construct
  misc_feature 1..24: note = Description of Artificial Sequence: Synthetic oligonucleotide
  source 1..24: mol_type = other DNA
tcgcagcaagagcttcagcctgag

SEQ ID NO: 776 - DNA, 24 bp, synthetic construct
  misc_feature 1..24: note = Description of Artificial Sequence: Synthetic oligonucleotide
  source 1..24: mol_type = other DNA
gtgcgggaagagcttcatccagag

SEQ ID NO: 777 - DNA, 24 bp, synthetic construct
  misc_feature 1..24: note = Description of Artificial Sequence: Synthetic oligonucleotide
  source 1..24: mol_type = other DNA
gtgtggcaagagcttcagcaggag

SEQ ID NO: 778 - DNA, 24 bp, synthetic construct
  misc_feature 1..24: note = Description of Artificial Sequence: Synthetic oligonucleotide
  source 1..24: mol_type = other DNA
gtgtgggaagagcttcagccagag

SEQ ID NO: 779 - DNA, 24 bp, synthetic construct
  misc_feature 1..24: note = Description of Artificial Sequence: Synthetic oligonucleotide
  source 1..24: mol_type = other DNA
gtgcaacaagagctccagcctgag

SEQ ID NO: 780 - DNA, 24 bp, synthetic construct
  misc_feature 1..24: note = Description of Artificial Sequence: Synthetic oligonucleotide
  source 1..24: mol_type = other DNA
gtgcggcaagagcttcagccgggg

SEQ ID NO: 781 - DNA, 24 bp, synthetic construct
  misc_feature 1..24: note = Description of Artificial Sequence: Synthetic oligonucleotide
  source 1..24: mol_type = other DNA
atgtggtaagggcttcagccagag

SEQ ID NO: 782 - DNA, 24 bp, synthetic construct
  misc_feature 1..24: note = Description of Artificial Sequence: Synthetic oligonucleotide
  source 1..24: mol_type = other DNA
atgtggtaagagcttcagccagat

SEQ ID NO: 783 - DNA, 24 bp, synthetic construct
  misc_feature 1..24: note = Description of Artificial Sequence: Synthetic oligonucleotide
  source 1..24: mol_type = other DNA
gtgtggcaagaccttcagccagac

SEQ ID NO: 784 - DNA, 24 bp, synthetic construct
  misc_feature 1..24: note = Description of Artificial Sequence: Synthetic oligonucleotide
  source 1..24: mol_type = other DNA
ctgcggcaagtgcttcagctggag

SEQ ID NO: 785 - DNA, 24 bp, synthetic construct
  misc_feature 1..24: note = Description of Artificial Sequence: Synthetic oligonucleotide
  source 1..24: mol_type = other DNA
gtgcggcaagagcttcagccagaa

SEQ ID NO: 786 - DNA, 24 bp, synthetic construct
  misc_feature 1..24: note = Description of Artificial Sequence: Synthetic oligonucleotide
  source 1..24: mol_type = other DNA
gtgtggcaagaccttcagccggac

SEQ ID NO: 787 - DNA, 24 bp, synthetic construct
  misc_feature 1..24: note = Description of Artificial Sequence: Synthetic oligonucleotide
  source 1..24: mol_type = other DNA
gtgcggcaagagcttcagccagtg

SEQ ID NO: 788 - DNA, 24 bp, synthetic construct
  misc_feature 1..24: note = Description of Artificial Sequence: Synthetic oligonucleotide
  source 1..24: mol_type = other DNA
gtgtggcaagagcttcagcaggaa

SEQ ID NO: 789 - DNA, 24 bp, synthetic construct
  misc_feature 1..24: note = Description of Artificial Sequence: Synthetic oligonucleotide
  source 1..24: mol_type = other DNA
gtgcggcaagagcttcagccggcg

SEQ ID NO: 790 - DNA, 24 bp, synthetic construct
  misc_feature 1..24: note = Description of Artificial Sequence: Synthetic oligonucleotide
  source 1..24: mol_type = other DNA
gagcagcaagaacttcagcccaag

SEQ ID NO: 791 - DNA, 24 bp, synthetic construct
  misc_feature 1..24: note = Description of Artificial Sequence: Synthetic oligonucleotide
  source 1..24: mol_type = other DNA
gtgtggcaagggcttcagccaggc

SEQ ID NO: 792 - DNA, 24 bp, synthetic construct
  misc_feature 1..24: note = Description of Artificial Sequence: Synthetic oligonucleotide
  source 1..24: mol_type = other DNA
gtgcggcaaggccttcagccagag

SEQ ID NO: 793 - DNA, 24 bp, synthetic construct
  misc_feature 1..24: note = Description of Artificial Sequence: Synthetic oligonucleotide
  source 1..24: mol_type = other DNA
gtgcggcaagaccttcaccctgag

SEQ ID NO: 794 - DNA, 24 bp, synthetic construct
  misc_feature 1..24: note = Description of Artificial Sequence: Synthetic oligonucleotide
  source 1..24: mol_type = other DNA
atgaggcaagaacataagcctgag

SEQ ID NO: 795 - DNA, 24 bp, synthetic construct
  misc_feature 1..24: note = Description of Artificial Sequence: Synthetic oligonucleotide
  source 1..24: mol_type = other DNA
gcagaagggattccatgaggtgcg

SEQ ID NO: 796 - DNA, 24 bp, synthetic construct
  misc_feature 1..24: note = Description of Artificial Sequence: Synthetic oligonucleotide
  source 1..24: mol_type = other DNA
tgagaagagatcccatgagggaag

SEQ ID NO: 797 - DNA, 23 bp, synthetic construct
  misc_feature 1..23: note = Description of Artificial Sequence: Synthetic oligonucleotide
  source 1..23: mol_type = other DNA
gaagggattccatgaggtgcgcg

SEQ ID NO: 798 - DNA, 23 bp, synthetic construct
  misc_feature 1..23: note = Description of Artificial Sequence: Synthetic oligonucleotide
  source 1..23: mol_type = other DNA
atagggattccatgaggtgtgga

SEQ ID NO: 799 - DNA, 23 bp, synthetic construct
  misc_feature 1..23: note = Description of Artificial Sequence: Synthetic oligonucleotide
  source 1..23: mol_type = other DNA
gggtgcattttcaggaggaagcg

SEQ ID NO: 800 - DNA, 24 bp, synthetic construct
  misc_feature 1..24: note = Description of Artificial Sequence: Synthetic oligonucleotide
  source 1..24: mol_type = other DNA
gcagacggcagtcactagggggcg

SEQ ID NO: 801 - DNA, 25 bp, synthetic construct
  misc_feature 1..25: note = Description of Artificial Sequence: Synthetic oligonucleotide
  source 1..25: mol_type = other DNA
acagaaggcagccactagggaggcc

SEQ ID NO: 802 - DNA, 24 bp, synthetic construct
  misc_feature 1..24: note = Description of Artificial Sequence: Synthetic oligonucleotide
  source 1..24: mol_type = other DNA
tcagacggtggtcactaggaggcg

SEQ ID NO: 803 - DNA, 24 bp, synthetic construct
  misc_feature 1..24: note = Description of Artificial Sequence: Synthetic oligonucleotide
  source 1..24: mol_type = other DNA
gcagaaaacagccactagggtgcc

SEQ ID NO: 804 - DNA, 24 bp, synthetic construct
  misc_feature 1..24: note = Description of Artificial Sequence: Synthetic oligonucleotide
  source 1..24: mol_type = other DNA
gcagacgacagtcactaggaagcc

SEQ ID NO: 805 - DNA, 24 bp, synthetic construct
  misc_feature 1..24: note = Description of Artificial Sequence: Synthetic oligonucleotide
  source 1..24: mol_type = other DNA
gctgggtgaatggagcgagcagcg

SEQ ID NO: 806 - DNA, 23 bp, synthetic construct
  misc_feature 1..23: note = Description of Artificial Sequence: Synthetic oligonucleotide
  source 1..23: mol_type = other DNA
gagttagagcagaagaagaaagg

SEQ ID NO: 807 - DNA, 23 bp, synthetic construct
  misc_feature 1..23: note = Description of Artificial Sequence: Synthetic oligonucleotide
  source 1..23: mol_type = other DNA
gagtctaagcagaagaagaagag

SEQ ID NO: 808 - DNA, 23 bp, synthetic construct
  misc_feature 1..23: note = Description of Artificial Sequence: Synthetic oligonucleotide
  source 1..23: mol_type = other DNA
gaggccgagcagaagaaagacgg

SEQ ID NO: 809 - DNA, 23 bp, synthetic construct
  misc_feature 1..23: note = Description of Artificial Sequence: Synthetic oligonucleotide
  source 1..23: mol_type = other DNA
gagtcctagcaggagaagaagag

SEQ ID NO: 810 - DNA, 23 bp, synthetic construct
  misc_feature 1..23: note = Description of Artificial Sequence: Synthetic oligonucleotide
  source 1..23: mol_type = other DNA
aagtctgagcacaagaagaatgg

SEQ ID NO: 811 - DNA, 23 bp, synthetic construct
  misc_feature 1..23: note = Description of Artificial Sequence: Synthetic oligonucleotide
  source 1..23: mol_type = other DNA
gagtccgggaaggagaagaaagg

SEQ ID NO: 812 - DNA, 23 bp, synthetic construct
  misc_feature 1..23: note = Description of Artificial Sequence: Synthetic oligonucleotide
  source 1..23: mol_type = other DNA
gaatccaagcaggagaagaagga

SEQ ID NO: 813 - DNA, 23 bp, synthetic construct
  misc_feature 1..23: note = Description of Artificial Sequence: Synthetic oligonucleotide
  source 1..23: mol_type = other DNA
gtgtggcaagggcttcagccagg

SEQ ID NO: 814 - DNA, 23 bp, synthetic construct
  misc_feature 1..23: note = Description of Artificial Sequence: Synthetic oligonucleotide
  source 1..23: mol_type = other DNA
gtgaggcaggagcatcagcccgg

SEQ ID NO: 815 - DNA, 23 bp, synthetic construct
  misc_feature 1..23: note = Description of Artificial Sequence: Synthetic oligonucleotide
  source 1..23: mol_type = other DNA
atggggaaagagcttcagcctgg

SEQ ID NO: 816 - DNA, 23 bp, synthetic construct
  misc_feature 1..23: note = Description of Artificial Sequence: Synthetic oligonucleotide
  source 1..23: mol_type = other DNA
gtgagggaagagcttcagcaagg

SEQ ID NO: 817 - DNA, 23 bp, synthetic construct
  misc_feature 1..23: note = Description of Artificial Sequence: Synthetic oligonucleotide
  source 1..23: mol_type = other DNA
atgtggtaagagcttcagccaga

SEQ ID NO: 818 - DNA, 23 bp, synthetic construct
  misc_feature 1..23: note = Description of Artificial Sequence: Synthetic oligonucleotide
  source 1..23: mol_type = other DNA
gtggggcaagaggttcagcctgg

SEQ ID NO: 819 - DNA, 23 bp, synthetic construct
  misc_feature 1..23: note = Description of Artificial Sequence: Synthetic oligonucleotide
  source 1..23: mol_type = other DNA
gtgcggcaagagcttcagccaga

SEQ ID NO: 820 - DNA, 23 bp, synthetic construct
  misc_feature 1..23: note = Description of Artificial Sequence: Synthetic oligonucleotide
  source 1..23: mol_type = other DNA
ctgtggcaagagcttcagccaga

SEQ ID NO: 821 - DNA, 23 bp, synthetic construct
  misc_feature 1..23: note = Description of Artificial Sequence: Synthetic oligonucleotide
  source 1..23: mol_type = other DNA
tcgcagcaagagcttcagcctga

SEQ ID NO: 822 - DNA, 23 bp, synthetic construct
  misc_feature 1..23: note = Description of Artificial Sequence: Synthetic oligonucleotide
  source 1..23: mol_type = other DNA
gtgctgcaggggcttcagcccgg

SEQ ID NO: 823 - DNA, 23 bp, synthetic construct
  misc_feature 1..23: note = Description of Artificial Sequence: Synthetic oligonucleotide
  source 1..23: mol_type = other DNA
gtgtggcaagaccttcagccgga

SEQ ID NO: 824 - DNA, 23 bp, synthetic construct
  misc_feature 1..23: note = Description of Artificial Sequence: Synthetic oligonucleotide
  source 1..23: mol_type = other DNA
gtgtggcaagagcttcagcagga

SEQ ID NO: 825 - DNA, 23 bp, synthetic construct
  misc_feature 1..23: note = Description of Artificial Sequence: Synthetic oligonucleotide
  source 1..23: mol_type = other DNA
ttccggcaggagcttcagcctgg

SEQ ID NO: 826 - DNA, 23 bp, synthetic construct
  misc_feature 1..23: note = Description of Artificial Sequence: Synthetic oligonucleotide
  source 1..23: mol_type = other DNA
gtgtgacaagagcttcaacaggg

SEQ ID NO: 827 - DNA, 23 bp, synthetic construct
  misc_feature 1..23: note = Description of Artificial Sequence: Synthetic oligonucleotide
  source 1..23: mol_type = other DNA
gctgagtgagtgtatgcgtgtgg

SEQ ID NO: 828 - DNA, 23 bp, synthetic construct
  misc_feature 1..23: note = Description of Artificial Sequence: Synthetic oligonucleotide
  source 1..23: mol_type = other DNA
tgtgggtgagtgtgtgcgtgagg

SEQ ID NO: 829 - DNA, 23 bp, synthetic construct
  misc_feature 1..23: note = Description of Artificial Sequence: Synthetic oligonucleotide
  source 1..23: mol_type = other DNA
agtgagtgagtgtgtgtgtgggg

SEQ ID NO: 830 - DNA, 23 bp, synthetic construct
  misc_feature 1..23: note = Description of Artificial Sequence: Synthetic oligonucleotide
  source 1..23: mol_type = other DNA
agagagtgagtgtgtgcatgagg

SEQ ID NO: 831 - DNA, 23 bp, synthetic construct
  misc_feature 1..23: note = Description of Artificial Sequence: Synthetic oligonucleotide
  source 1..23: mol_type = other DNA
gttgagtgaatgtgtgcgtgagg

SEQ ID NO: 832 - DNA, 23 bp, synthetic construct
  misc_feature 1..23: note = Description of Artificial Sequence: Synthetic oligonucleotide
  source 1..23: mol_type = other DNA
agtgaatgagtgtgtgtgtgtgg

SEQ ID NO: 833 - DNA, 23 bp, synthetic construct
  misc_feature 1..23: note = Description of Artificial Sequence: Synthetic oligonucleotide
  source 1..23: mol_type = other DNA
ggtgagtgagtgcgtgcgggtgg

SEQ ID NO: 834 - DNA, 23 bp, synthetic construct
  misc_feature 1..23: note = Description of Artificial Sequence: Synthetic oligonucleotide
  source 1..23: mol_type = other DNA
agcgagtgggtgtgtgcgtgggg

SEQ ID NO: 835 - DNA, 23 bp, synthetic construct
  misc_feature 1..23: note = Description of Artificial Sequence: Synthetic oligonucleotide
  source 1..23: mol_type = other DNA
agtgtgtgagtgtgtgcgtgtgg

SEQ ID NO: 836 - DNA, 23 bp, synthetic construct
  misc_feature 1..23: note = Description of Artificial Sequence: Synthetic oligonucleotide
  source 1..23: mol_type = other DNA
tgtgagtaagtgtgtgtgtgtgg

SEQ ID NO: 837 - DNA, 23 bp, synthetic construct
  misc_feature 1..23: note = Description of Artificial Sequence: Synthetic oligonucleotide
  source 1..23: mol_type = other DNA
actgtgtgagtgtgtgcgtgagg

SEQ ID NO: 838 - DNA, 23 bp, synthetic construct
  misc_feature 1..23: note = Description of Artificial Sequence: Synthetic oligonucleotide
  source 1..23: mol_type = other DNA
ggtgagtgagtgtgtgtgtgagg

SEQ ID NO: 839 - DNA, 23 bp, synthetic construct
  misc_feature 1..23: note = Description of Artificial Sequence: Synthetic oligonucleotide
  source 1..23: mol_type = other DNA
tgtgggtgagtgtgtgcgtgaga

SEQ ID NO: 840 - DNA, 23 bp, synthetic construct
  misc_feature 1..23: note = Description of Artificial Sequence: Synthetic oligonucleotide
  source 1..23: mol_type = other DNA
ggtggatgagtgtgtgtgtgggg

SEQ ID NO: 841 - DNA, 23 bp, synthetic construct
  misc_feature 1..23: note = Description of Artificial Sequence: Synthetic oligonucleotide
  source 1..23: mol_type = other DNA
tgtgagtgagtgtgtgcgtgtga

SEQ ID NO: 842 - DNA, 23 bp, synthetic construct
  misc_feature 1..23: note = Description of Artificial Sequence: Synthetic oligonucleotide
  source 1..23: mol_type = other DNA
agggagtgactgtgtgcgtgtgg

SEQ ID NO: 843 - DNA, 23 bp, synthetic construct
  misc_feature 1..23: note = Description of Artificial Sequence: Synthetic oligonucleotide
  source 1..23: mol_type = other DNA
ggtgtgtgagtgtgtgtgtgtgg

SEQ ID NO: 844 - DNA, 23 bp, synthetic construct
  misc_feature 1..23: note = Description of Artificial Sequence: Synthetic oligonucleotide
  source 1..23: mol_type = other DNA
agcgagtgagtgtgtgtgtgggg

SEQ ID NO: 845 - DNA, 23 bp, synthetic construct
  misc_feature 1..23: note = Description of Artificial Sequence: Synthetic oligonucleotide
  source 1..23: mol_type = other DNA
tgtgggtgagcatgtgcgtgagg

SEQ ID NO: 846 - DNA, 23 bp, synthetic construct
  misc_feature 1..23: note = Description of Artificial Sequence: Synthetic oligonucleotide
  source 1..23: mol_type = other DNA
tgtgagtgagtgtgtgtatgggg

SEQ ID NO: 847 - DNA, 23 bp, synthetic construct
  misc_feature 1..23: note = Description of Artificial Sequence: Synthetic oligonucleotide
  source 1..23: mol_type = other DNA
agtgagaaagtgtgtgcatgcgg

SEQ ID NO: 848 - DNA, 23 bp, synthetic construct
  misc_feature 1..23: note = Description of Artificial Sequence: Synthetic oligonucleotide
  source 1..23: mol_type = other DNA
ggtgagtaagtgtgagcgtaagg

SEQ ID NO: 849 - DNA, 23 bp, synthetic construct
  misc_feature 1..23: note = Description of Artificial Sequence: Synthetic oligonucleotide
  source 1..23: mol_type = other DNA
tgtgggtgagtgtgtgtgtgtgg

SEQ ID NO: 850 - DNA, 23 bp, synthetic construct
  misc_feature 1..23: note = Description of Artificial Sequence: Synthetic oligonucleotide
  source 1..23: mol_type = other DNA
tgtgagtgagtgtgtgtgtgtga

SEQ ID NO: 851 - DNA, 23 bp, synthetic construct
  misc_feature 1..23: note = Description of Artificial Sequence: Synthetic oligonucleotide
  source 1..23: mol_type = other DNA
agtgagtgagtgagtgagtgagg

SEQ ID NO: 852 - DNA, 23 bp, synthetic construct
  misc_feature 1..23: note = Description of Artificial Sequence: Synthetic oligonucleotide
  source 1..23: mol_type = other DNA
gatgagtgagtgagtgagtgggg

SEQ ID NO: 853 - DNA, 23 bp, synthetic construct
  misc_feature 1..23: note = Description of Artificial Sequence: Synthetic oligonucleotide
  source 1..23: mol_type = other DNA
agtgagtaagtgagtgagtgagg

SEQ ID NO: 854 - DNA, 23 bp, synthetic construct
  misc_feature 1..23: note = Description of Artificial Sequence: Synthetic oligonucleotide
  source 1..23: mol_type = other DNA
agtgagtatgtgtgtgtgtgggg

SEQ ID NO: 855 - DNA, 23 bp, synthetic construct
  misc_feature 1..23: note = Description of Artificial Sequence: Synthetic oligonucleotide
  source 1..23: mol_type = other DNA
gatgagtgtgtgtgtgtgtgagg

SEQ ID NO: 856 - DNA, 23 bp, synthetic construct
  misc_feature 1..23: note = Description of Artificial Sequence: Synthetic oligonucleotide
  source 1..23: mol_type = other DNA
ggtgtgtgagtgtgagtgtgggg

SEQ ID NO: 857 - DNA, 23 bp, synthetic construct
  misc_feature 1..23: note = Description of Artificial Sequence: Synthetic oligonucleotide
  source 1..23: mol_type = other DNA
ggtgagtgtgtgtgtgcatgtgg

SEQ ID NO: 858 - DNA, 23 bp, synthetic construct
  misc_feature 1..23: note = Description of Artificial Sequence: Synthetic oligonucleotide
  source 1..23: mol_type = other DNA
gatgagtcagtgagtgagtgggg

SEQ ID NO: 859 - DNA, 23 bp, synthetic construct
  misc_feature 1..23: note = Description of Artificial Sequence: Synthetic oligonucleotide
  source 1..23: mol_type = other DNA
ggtgagtcagtgtgtgagtgagg

SEQ ID NO: 860 - DNA, 23 bp, synthetic construct
  misc_feature 1..23: note = Description of Artificial Sequence: Synthetic oligonucleotide
  source 1..23: mol_type = other DNA
agtgagtgagtatgtgtgtatgg

SEQ ID NO: 861 - DNA, 23 bp, synthetic construct
  misc_feature 1..23: note = Description of Artificial Sequence: Synthetic oligonucleotide
  source 1..23: mol_type = other DNA
ggtgagtgagtgagtgagtgagg

SEQ ID NO: 862 - DNA, 23 bp, synthetic construct
  misc_feature 1..23: note = Description of Artificial Sequence: Synthetic oligonucleotide
  source 1..23: mol_type = other DNA
tgtgagtgagtgtgtgtgtgtga

SEQ ID NO: 863 - DNA, 23 bp, synthetic construct
  misc_feature 1..23: note = Description of Artificial Sequence: Synthetic oligonucleotide
  source 1..23: mol_type = other DNA
ggtgagagagtgtgtgcgtagga

SEQ ID NO: 864 - DNA, 23 bp, synthetic construct
  misc_feature 1..23: note = Description of Artificial Sequence: Synthetic oligonucleotide
  source 1..23: mol_type = other DNA
ggagagtgagtgtgtgcatgtgc

SEQ ID NO: 865 - DNA, 23 bp, synthetic construct
  misc_feature 1..23: note = Description of Artificial Sequence: Synthetic oligonucleotide
  source 1..23: mol_type = other DNA
tgtgagtgggtgtgtgcatgtgg

SEQ ID NO: 866 - DNA, 23 bp, synthetic construct
  misc_feature 1..23: note = Description of Artificial Sequence: Synthetic oligonucleotide
  source 1..23: mol_type = other DNA
agtgagtgagtgtgtgtgtgaga

SEQ ID NO: 867 - DNA, 23 bp, synthetic construct
  misc_feature 1..23: note = Description of Artificial Sequence: Synthetic oligonucleotide
  source 1..23: mol_type = other DNA
tgtgagtgagtgtgtgtgtgtga

SEQ ID NO: 868 - DNA, 23 bp, synthetic construct
  misc_feature 1..23: note = Description of Artificial Sequence: Synthetic oligonucleotide
  source 1..23: mol_type = other DNA
aatgagtgagtgtgtgtgtgtga

SEQ ID NO: 869 - DNA, 23 bp, synthetic construct
  misc_feature 1..23: note = Description of Artificial Sequence: Synthetic oligonucleotide
  source 1..23: mol_type = other DNA
ggtgagcaagtgtgtgtgtgtgg

SEQ ID NO: 870 - DNA, 23 bp, synthetic construct
  misc_feature 1..23: note = Description of Artificial Sequence: Synthetic oligonucleotide
  source 1..23: mol_type = other DNA
ctggagtgagtgtgtgtgtgtgg

SEQ ID NO: 871 - DNA, 23 bp, synthetic construct
  misc_feature 1..23: note = Description of Artificial Sequence: Synthetic oligonucleotide
  source 1..23: mol_type = other DNA
ggtgagtaggtgtgtgtgtgggg

SEQ ID NO: 872 - DNA, 22 bp, synthetic construct
  misc_feature 1..22: note = Description of Artificial Sequence: Synthetic oligonucleotide
  source 1..22: mol_type = other DNA
ggggtgtgggtgtgggggtgtg

SEQ ID NO: 873 - DNA, 23 bp, synthetic construct
  misc_feature 1..23: note = Description of Artificial Sequence: Synthetic oligonucleotide
  source 1..23: mol_type = other DNA
cgtgagtgagtgtgtacctgggg

SEQ ID NO: 874 - DNA, 27 bp, synthetic construct
  misc_feature 1..27: note = Description of Artificial Sequence: Synthetic oligonucleotide
  source 1..27: mol_type = other DNA
gcaaccacaaacccacgagggcagagt

SEQ ID NO: 875 - DNA, 27 bp, synthetic construct
  misc_feature 1..27: note = Description of Artificial Sequence: Synthetic oligonucleotide
  source 1..27: mol_type = other DNA
acaaacacatacccacaaggacagagt

SEQ ID NO: 876 - DNA, 27 bp, synthetic construct
  misc_feature 1..27: note = Description of Artificial Sequence: Synthetic oligonucleotide
  source 1..27: mol_type = other DNA
gcaatcacaataccacaagggaagagg

SEQ ID NO: 877 - DNA, 27 bp, synthetic construct
  misc_feature 1..27: note = Description of Artificial Sequence: Synthetic oligonucleotide
  source 1..27: mol_type = other DNA
gtagggccttcgcgcacctcanngrrt

SEQ ID NO: 878 - DNA, 27 bp, synthetic construct
  misc_feature 1..27: note = Description of Artificial Sequence: Synthetic oligonucleotide
  source 1..27: mol_type = other DNA
gtagggccttcgcgcacctcatggaat

SEQ ID NO: 879 - DNA, 27 bp, synthetic construct
  misc_feature 1..27: note = Description of Artificial Sequence: Synthetic oligonucleotide
  source 1..27: mol_type = other DNA
gcaaggcccggcgcacggtggnngrrt

SEQ ID NO: 880 - DNA, 27 bp, synthetic construct
  misc_feature 1..27: note = Description of Artificial Sequence: Synthetic oligonucleotide
  source 1..27: mol_type = other DNA
gcaaggcccggcgcacggtggcggggt

SEQ ID NO: 881 - DNA, 27 bp, synthetic construct
  misc_feature 1..27: note = Description of Artificial Sequence: Synthetic oligonucleotide
  source 1..27: mol_type = other DNA
ctgaggcccggcccacggtggtgagga

SEQ ID NO: 882 - DNA, 27 bp, synthetic construct
  misc_feature 1..27: note = Description of Artificial Sequence: Synthetic oligonucleotide
  source 1..27: mol_type = other DNA
acaaggctcagaacacggtgagaaagt

SEQ ID NO: 883 - DNA, 27 bp, synthetic construct
  misc_feature 1..27: note = Description of Artificial Sequence: Synthetic oligonucleotide
  source 1..27: mol_type = other DNA
gcaaggccccaggcatggtggcacagt

SEQ ID NO: 884 - DNA, 27 bp, synthetic construct
  misc_feature 1..27: note = Description of Artificial Sequence: Synthetic oligonucleotide
  source 1..27: mol_type = other DNA
gaaagagagatgtagggctagnngrrt

SEQ ID NO: 885 - DNA, 27 bp, synthetic construct
  misc_feature 1..27: note = Description of Artificial Sequence: Synthetic oligonucleotide
  source 1..27: mol_type = other DNA
gaaagagagatgtagggctagaggggt

SEQ ID NO: 886 - DNA, 27 bp, synthetic construct
  misc_feature 1..27: note = Description of Artificial Sequence: Synthetic oligonucleotide
  source 1..27: mol_type = other DNA
gaaagaggcatgtagggctacagaggc

SEQ ID NO: 887 - DNA, 27 bp, synthetic construct
  misc_feature 1..27: note = Description of Artificial Sequence: Synthetic oligonucleotide
  source 1..27: mol_type = other DNA
gaaagagagaaatagggctagaacaaa

SEQ ID NO: 888 - DNA, 29 bp, synthetic construct
  misc_feature 1..29: note = Description of Artificial Sequence: Synthetic oligonucleotide
  source 1..29: mol_type = other DNA
gtactcacctctcatgaagcactnngrrt

SEQ ID NO: 889 - DNA, 29 bp, synthetic construct
  misc_feature 1..29: note = Description of Artificial Sequence: Synthetic oligonucleotide
  source 1..29: mol_type = other DNA
gtactcacctctcatgaagcactgtgggt

SEQ ID NO: 890 - DNA, 29 bp, synthetic construct
  misc_feature 1..29: note = Description of Artificial Sequence: Synthetic oligonucleotide
  source 1..29: mol_type = other DNA
tacctcacctgccaggaagcacttgaaat

SEQ ID NO: 891 - DNA, 27 bp, synthetic construct
  misc_feature 1..27: note = Description of Artificial Sequence: Synthetic oligonucleotide
  source 1..27: mol_type = other DNA
gggtgagtgagtgtgtgcgtgtggggt

SEQ ID NO: 892 - DNA, 27 bp, synthetic construct
  misc_feature 1..27: note = Description of Artificial Sequence: Synthetic oligonucleotide
  source 1..27: mol_type = other DNA
gggtgagtcagtgagtgcgtggtgagt

SEQ ID NO: 893 - DNA, 27 bp, synthetic construct
  misc_feature 1..27: note = Description of Artificial Sequence: Synthetic oligonucleotide
  source 1..27: mol_type = other DNA
gagcgagtgggtgtgtgcgtggggggt

SEQ ID NO: 894 - DNA, 27 bp, synthetic construct
  misc_feature 1..27: note = Description of Artificial Sequence: Synthetic oligonucleotide
  source 1..27: mol_type = other DNA
gggtgagtcagtgagtgcgtgatgagt

SEQ ID NO: 895 - DNA, 27 bp, synthetic construct
  misc_feature 1..27: note = Description of Artificial Sequence: Synthetic oligonucleotide
  source 1..27: mol_type = other DNA
gagtgaatgagtgtgtgtgtgtggggt

SEQ ID NO: 896 - DNA, 27 bp, synthetic construct
  misc_feature 1..27: note = Description of Artificial Sequence: Synthetic oligonucleotide
  source 1..27: mol_type = other DNA
gggtgagtcagtgtgtgagtggtgagt

SEQ ID NO: 897 - DNA, 27 bp, synthetic construct
  misc_feature 1..27: note = Description of Artificial Sequence: Synthetic oligonucleotide
  source 1..27: mol_type = other DNA
gggtgagtcagtgagtgcgtggtgagt

SEQ ID NO: 898 - DNA, 27 bp, synthetic construct
  misc_feature 1..27: note = Description of Artificial Sequence: Synthetic oligonucleotide
  source 1..27: mol_type = other DNA
gtgtgagtgtgtgtgtgcgtacagggt

SEQ ID NO: 899 - DNA, 27 bp, synthetic construct
  misc_feature 1..27: note = Description of Artificial Sequence: Synthetic oligonucleotide
  source 1..27: mol_type = other DNA
gagtgagtgagtgtgtgtgtggggggg

SEQ ID NO: 900 - DNA, 27 bp, synthetic construct
  misc_feature 1..27: note = Description of Artificial Sequence: Synthetic oligonucleotide
  source 1..27: mol_type = other DNA
gggtgagtcagtgtgtgggtggtgagt

SEQ ID NO: 901 - DNA, 27 bp, synthetic construct
  misc_feature 1..27: note = Description of Artificial Sequence: Synthetic oligonucleotide
  source 1..27: mol_type = other DNA
gggtgagtcagtgtgtgagtggtgagt

SEQ ID NO: 902 - DNA, 27 bp, synthetic construct
  misc_feature 1..27: note = Description of Artificial Sequence: Synthetic oligonucleotide
  source 1..27: mol_type = other DNA
gggtgagtcagtgtgtgagtggagagt

SEQ ID NO: 903 - DNA, 27 bp, synthetic construct
  misc_feature 1..27: note = Description of Artificial Sequence: Synthetic oligonucleotide
  source 1..27: mol_type = other DNA
gggtgagtcagtgtgtgagtggtgagt

SEQ ID NO: 904 - DNA, 27 bp, synthetic construct
  misc_feature 1..27: note = Description of Artificial Sequence: Synthetic oligonucleotide
  source 1..27: mol_type = other DNA
gagtgagtaagtgtgtgtgtgtgtggt

SEQ ID NO: 905 - DNA, 27 bp, synthetic construct
  misc_feature 1..27: note = Description of Artificial Sequence: Synthetic oligonucleotide
  source 1..27: mol_type = other DNA
gggtgtgtgtctgtgtgcgtgtggggt

SEQ ID NO: 906 - DNA, 27 bp, synthetic construct
  misc_feature 1..27: note = Description of Artificial Sequence: Synthetic oligonucleotide
  source 1..27: mol_type = other DNA
gggtgagtcagtgtgtgagtggtgagt

SEQ ID NO: 907 - DNA, 27 bp, synthetic construct
  misc_feature 1..27: note = Description of Artificial Sequence: Synthetic oligonucleotide
  source 1..27: mol_type = other DNA
ggatgagtgagtgagtgagtggggagt

SEQ ID NO: 908 - DNA, 27 bp, synthetic construct
  misc_feature 1..27: note = Description of Artificial Sequence: Synthetic oligonucleotide
  source 1..27: mol_type = other DNA
gggtgagtcactgtgtgagtggtgagt

SEQ ID NO: 909 - DNA, 27 bp, synthetic construct
  misc_feature 1..27: note = Description of Artificial Sequence: Synthetic oligonucleotide
  source 1..27: mol_type = other DNA
gggagagagagtgtgtgcgtgtgtggt

SEQ ID NO: 910 - DNA, 27 bp, synthetic construct
  misc_feature 1..27: note = Description of Artificial Sequence: Synthetic oligonucleotide
  source 1..27: mol_type = other DNA
ggctgaatgtgtgtgtgcgtgaatgat

SEQ ID NO: 911 - DNA, 27 bp, synthetic construct
  misc_feature 1..27: note = Description of Artificial Sequence: Synthetic oligonucleotide
  source 1..27: mol_type = other DNA
aggtgaccgtgtgtgtgcgtggagggt

SEQ ID NO: 912 - DNA, 27 bp, synthetic construct
  misc_feature 1..27: note = Description of Artificial Sequence: Synthetic oligonucleotide
  source 1..27: mol_type = other DNA
gtatgggtgagagtgtgcgtgcacagt

SEQ ID NO: 913 - DNA, 27 bp, synthetic construct
  misc_feature 1..27: note = Description of Artificial Sequence: Synthetic oligonucleotide
  source 1..27: mol_type = other DNA
gtgggtgtgggggtgtgggtgttgggg

SEQ ID NO: 914 - DNA, 27 bp, synthetic construct
  misc_feature 1..27: note = Description of Artificial Sequence: Synthetic oligonucleotide
  source 1..27: mol_type = other DNA
gggtgagtcagtgtgtgagtggtgagt

SEQ ID NO: 915 - DNA, 27 bp, synthetic construct
  misc_feature 1..27: note = Description of Artificial Sequence: Synthetic oligonucleotide
  source 1..27: mol_type = other DNA
gggtgagtcagtgtgtgagtggtgagt

SEQ ID NO: 916 - DNA, 27 bp, synthetic construct
  misc_feature 1..27: note = Description of Artificial Sequence: Synthetic oligonucleotide
  source 1..27: mol_type = other DNA
gaatgagtgtgtgtgtgtgtgtgcagt

SEQ ID NO: 917 - DNA, 27 bp, synthetic construct
  misc_feature 1..27: note = Description of Artificial Sequence: Synthetic oligonucleotide
  source 1..27: mol_type = other DNA
gagtgagtgtgtgtgtgtgagagagag

SEQ ID NO: 918 - DNA, 27 bp, synthetic construct
  misc_feature 1..27: note = Description of Artificial Sequence: Synthetic oligonucleotide
  source 1..27: mol_type = other DNA
ggatgagtgagtgagtgcatgttgagt

SEQ ID NO: 919 - DNA, 27 bp, synthetic construct
  misc_feature 1..27: note = Description of Artificial Sequence: Synthetic oligonucleotide
  source 1..27: mol_type = other DNA
tggggtgtgggtgtgtgggtgtggggg

SEQ ID NO: 920 - DNA, 27 bp, synthetic construct
  misc_feature 1..27: note = Description of Artificial Sequence: Synthetic oligonucleotide
  source 1..27: mol_type = other DNA
gggtgagtgagtgagtgagtggtgggt

SEQ ID NO: 921 - DNA, 27 bp, synthetic construct
  misc_feature 1..27: note = Description of Artificial Sequence: Synthetic oligonucleotide
  source 1..27: mol_type = other DNA
gggtgagtgagtgagtgagtggtgagt

SEQ ID NO: 922 - DNA, 27 bp, synthetic construct
  misc_feature 1..27: note = Description of Artificial Sequence: Synthetic oligonucleotide
  source 1..27: mol_type = other DNA
gagtgagtcagtgtgtgagtggtgagt

SEQ ID NO: 923 - DNA, 27 bp, synthetic construct
  misc_feature 1..27: note = Description of Artificial Sequence: Synthetic oligonucleotide
  source 1..27: mol_type = other DNA
aagtgagtgagtgtgtgtgtgcaaaac

SEQ ID NO: 924 - DNA, 27 bp, synthetic construct
  misc_feature 1..27: note = Description of Artificial Sequence: Synthetic oligonucleotide
  source 1..27: mol_type = other DNA
gaatgagtgagtgtgtgtgtaagaagt

SEQ ID NO: 925 - DNA, 27 bp, synthetic construct
  misc_feature 1..27: note = Description of Artificial Sequence: Synthetic oligonucleotide
  source 1..27: mol_type = other DNA
gtgtgtgttggggtgtgggtgtggggg

SEQ ID NO: 926 - DNA, 28 bp, synthetic construct
  misc_feature 1..28: note = Description of Artificial Sequence: Synthetic oligonucleotide
  source 1..28: mol_type = other DNA
gtgtggtttcagaaccggaggatgaagc

SEQ ID NO: 927 - DNA, 28 bp, synthetic construct
  misc_feature 1..28: note = Description of Artificial Sequence: Synthetic oligonucleotide
  source 1..28: mol_type = other DNA
gtgtggttccagaaccggaggacaaagt

SEQ ID NO: 928 - DNA, 28 bp, synthetic construct
  misc_feature 1..28: note = Description of Artificial Sequence: Synthetic oligonucleotide
  source 1..28: mol_type = other DNA
atctggttccagaaccggaggatgaagt

SEQ ID NO: 929 - DNA, 28 bp, synthetic construct
  misc_feature 1..28: note = Description of Artificial Sequence: Synthetic oligonucleotide
  source 1..28: mol_type = other DNA
atctggttccagaaccgaaggatgaagt

SEQ ID NO: 930 - DNA, 28 bp, synthetic construct
  misc_feature 1..28: note = Description of Artificial Sequence: Synthetic oligonucleotide
  source 1..28: mol_type = other DNA
gtgtggttccagaaccgaaggatgaagt

SEQ ID NO: 931 - DNA, 28 bp, synthetic construct
  misc_feature 1..28: note = Description of Artificial Sequence: Synthetic oligonucleotide
  source 1..28: mol_type = other DNA
atctggttccagaaccggaggatgaagt

SEQ ID NO: 932 - DNA, 28 bp, synthetic construct
  misc_feature 1..28: note = Description of Artificial Sequence: Synthetic oligonucleotide
  source 1..28: mol_type = other DNA
gtgtggttccagaaccggcggatgaagt

SEQ ID NO: 933 - DNA, 28 bp, synthetic construct
  misc_feature 1..28: note = Description of Artificial Sequence: Synthetic oligonucleotide
  source 1..28: mol_type = other DNA
gtatggtttcagaaccgaagaacaaagt

SEQ ID NO: 934 - DNA, 28 bp, synthetic construct
  misc_feature 1..28: note = Description of Artificial Sequence: Synthetic oligonucleotide
  source 1..28: mol_type = other DNA
atctggtttcagaaccggaggatgaagt

SEQ ID NO: 935 - DNA, 28 bp, synthetic construct
  misc_feature 1..28: note = Description of Artificial Sequence: Synthetic oligonucleotide
  source 1..28: mol_type = other DNA
atctggttccagaaccgcaggatgaagt

SEQ ID NO: 936 - DNA, 28 bp, synthetic construct
  misc_feature 1..28: note = Description of Artificial Sequence: Synthetic oligonucleotide
  source 1..28: mol_type = other DNA
ttatggttccagaaacgaaggaagcaat

SEQ ID NO: 937 - DNA, 28 bp, synthetic construct
  misc_feature 1..28: note = Description of Artificial Sequence: Synthetic oligonucleotide
  source 1..28: mol_type = other DNA
ccaaggtcccggaaccgaaggaggaagg

SEQ ID NO: 938 - DNA, 28 bp, synthetic construct
  misc_feature 1..28: note = Description of Artificial Sequence: Synthetic oligonucleotide
  source 1..28: mol_type = other DNA
acgtggtaccagaatcggaggatgaagt

SEQ ID NO: 939 - DNA, 28 bp, synthetic construct
  misc_feature 1..28: note = Description of Artificial Sequence: Synthetic oligonucleotide
  source 1..28: mol_type = other DNA
acctggttccagaaccagaggatgaaat

SEQ ID NO: 940 - DNA, 28 bp, synthetic construct
  misc_feature 1..28: note = Description of Artificial Sequence: Synthetic oligonucleotide
  source 1..28: mol_type = other DNA
gtatggccccagaacagaaggaaagaat

SEQ ID NO: 941 - DNA, 28 bp, synthetic construct
  misc_feature 1..28: note = Description of Artificial Sequence: Synthetic oligonucleotide
  source 1..28: mol_type = other DNA
gtctggttccagaaccgaagggccaagt

SEQ ID NO: 942 - DNA, 27 bp, synthetic construct
  misc_feature 1..27: note = Description of Artificial Sequence: Synthetic oligonucleotide
  source 1..27: mol_type = other DNA
cctcagcctgagtgttgaggctgcggt

SEQ ID NO: 943 - DNA, 27 bp, synthetic construct
  misc_feature 1..27: note = Description of Artificial Sequence: Synthetic oligonucleotide
  source 1..27: mol_type = other DNA
gctcagcctgagtgttgaggccccagt

SEQ ID NO: 944 - DNA, 28 bp, synthetic construct
  misc_feature 1..28: note = Description of Artificial Sequence: Synthetic oligonucleotide
  source 1..28: mol_type = other DNA
gctgcagactgagtgttaaggccggagt

SEQ ID NO: 945 - DNA, 27 bp, synthetic construct
  misc_feature 1..27: note = Description of Artificial Sequence: Synthetic oligonucleotide
  source 1..27: mol_type = other DNA
gttcagcccaagtgttgagactcaggt

SEQ ID NO: 946 - DNA, 28 bp, synthetic construct
  misc_feature 1..28: note = Description of Artificial Sequence: Synthetic oligonucleotide
  source 1..28: mol_type = other DNA
cttgagcctgggtgtttgaggctgcagt

SEQ ID NO: 947 - DNA, 27 bp, synthetic construct
  misc_feature 1..27: note = Description of Artificial Sequence: Synthetic oligonucleotide
  source 1..27: mol_type = other DNA
actgagcctgagggttgaggctgcagt

SEQ ID NO: 948 - DNA, 27 bp, synthetic construct
  misc_feature 1..27: note = Description of Artificial Sequence: Synthetic oligonucleotide
  source 1..27: mol_type = other DNA
acacagccagagggttgaggcggaggt

SEQ ID NO: 949 - DNA, 27 bp, synthetic construct
  misc_feature 1..27: note = Description of Artificial Sequence: Synthetic oligonucleotide
  source 1..27: mol_type = other DNA
tatcagcttgagttttgaggctgagat

SEQ ID NO: 950 - DNA, 28 bp, synthetic construct
  misc_feature 1..28: note = Description of Artificial Sequence: Synthetic oligonucleotide
  source 1..28: mol_type = other DNA
cttgagccctgaatgttgaggctgcagt

SEQ ID NO: 951 - DNA, 28 bp, synthetic construct
  misc_feature 1..28: note = Description of Artificial Sequence: Synthetic oligonucleotide
  source 1..28: mol_type = other DNA
tttgagccctgagtgttgaggctgcagt

SEQ ID NO: 952 - DNA, 27 bp, synthetic construct
  misc_feature 1..27: note = Description of Artificial Sequence: Synthetic oligonucleotide
  source 1..27: mol_type = other DNA
ggctctccgaggagaaggccaagtggt

SEQ ID NO: 953 - DNA, 27 bp, synthetic construct
  misc_feature 1..27: note = Description of Artificial Sequence: Synthetic oligonucleotide
  source 1..27: mol_type = other DNA
ggctctccgatgggagggccagagaat

SEQ ID NO: 954 - DNA, 27 bp, synthetic construct
  misc_feature 1..27: note = Description of Artificial Sequence: Synthetic oligonucleotide
  source 1..27: mol_type = other DNA
ggctctctggggagaaagccagggagc

SEQ ID NO: 955 - DNA, 27 bp, synthetic construct
  misc_feature 1..27: note = Description of Artificial Sequence: Synthetic oligonucleotide
  source 1..27: mol_type = other DNA
ggctctcagaggagaaggccgagggga

SEQ ID NO: 956 - DNA, 27 bp, synthetic construct
  misc_feature 1..27: note = Description of Artificial Sequence: Synthetic oligonucleotide
  source 1..27: mol_type = other DNA
agttctccaaggagaagaccacgtggt

SEQ ID NO: 957 - DNA, 27 bp, synthetic construct
  misc_feature 1..27: note = Description of Artificial Sequence: Synthetic oligonucleotide
  source 1..27: mol_type = other DNA
aactctcccaggagaaggcccagaaat

SEQ ID NO: 958 - DNA, 28 bp, synthetic construct
  misc_feature 1..28: note = Description of Artificial Sequence: Synthetic oligonucleotide
  source 1..28: mol_type = other DNA
gcgcccactgcaaggcccggcgcacggt

SEQ ID NO: 959 - DNA, 28 bp, synthetic construct
  misc_feature 1..28: note = Description of Artificial Sequence: Synthetic oligonucleotide
  source 1..28: mol_type = other DNA
gcgcccactgcagggcccggctgcggag

SEQ ID NO: 960 - DNA, 27 bp, synthetic construct
  misc_feature 1..27: note = Description of Artificial Sequence: Synthetic oligonucleotide
  source 1..27: mol_type = other DNA
gtgcccacccagggcccggcacagagt

SEQ ID NO: 961 - DNA, 28 bp, synthetic construct
  misc_feature 1..28: note = Description of Artificial Sequence: Synthetic oligonucleotide
  source 1..28: mol_type = other DNA
aggcccactgcaaggcccagtgggcggc

SEQ ID NO: 962 - DNA, 27 bp, synthetic construct
  misc_feature 1..27: note = Description of Artificial Sequence: Synthetic oligonucleotide
  source 1..27: mol_type = other DNA
gtgcccacccagggcccggcacagagt

SEQ ID NO: 963 - DNA, 27 bp, synthetic construct
  misc_feature 1..27: note = Description of Artificial Sequence: Synthetic oligonucleotide
  source 1..27: mol_type = other DNA
ggggtcccaggtgctgacgtaggtagt

SEQ ID NO: 964 - DNA, 29 bp, synthetic construct
  misc_feature 1..29: note = Description of Artificial Sequence: Synthetic oligonucleotide
  source 1..29: mol_type = other DNA
ggggcacgggcagcttgcccgnnnnnnnn

SEQ ID NO: 965 - DNA, 29 bp, synthetic construct
  misc_feature 1..29: note = Description of Artificial Sequence: Synthetic oligonucleotide
  source 1..29: mol_type = other DNA
ggtcgccctcgaacttcacctnnnnnnnn

SEQ ID NO: 966 - protein, 5 aa, synthetic construct
  REGION 1..5: note = Description of Artificial Sequence: Synthetic peptide
IIKKG

SEQ ID NO: 967 - protein, 359 aa, synthetic construct
  REGION 1..359: note = Description of Artificial Sequence: Synthetic polypeptide
NKGYKHHAEDALIIANADFIFKEWKKLDKAKKVMENQMFEEKQAESMPEIETEQEYKEIFITPHQIKHIKDFKDYKYSHRVDKKPNRELINDTLYSTRKDDKGNTLIVNNLNGLYDKDNDKLKKLINKSPEKLLMYHHDPQTYQKLKLIMEQYGDEKNPLYKYYEETGNYLTKYSKKDNGPVIKKIKYYGNKLNAHLDITDDYPNSRNKVVKLSLKPYRFDVYLDNGVYKFVTVKNLDVIKKENYYEVNSKCYEEAKKLKKISNQAEFIASFYNNDLIKINGELYRVIGVNNDLLNRIEVNMIDITYREYLENMNDKRPPRIIKTIASKTQSIKKYSTDILGNLYEVKSKKHPQIIKKG

SEQ ID NO: 968 - protein, 359 aa, synthetic construct
  REGION 1..359: note = Description of Artificial Sequence: Synthetic polypeptide
NKGYKHHAEDALIIANADFIFKEWKRLDKAKKVMENQMFEEKQAESMPEIETEQEYKEIFITPHQIKHIKDFKDYKYSHRVDKKPNRELINDTLYSTRKDDKGNTLIVNNLNGLYDKDNDKLKKLINKSPEKLLMYHHDPQTYQKLKLIMEQYGDEKNPLYKYYEETGNYLTKYSKKDNGPVIKKIKYYGNKLNAHLDITDDYPNSRNKVVKLSLKPYRFDVYLDNGVYKFVTVKNLDVIKKENYYEVKSKCYEEAKKLKKISNQAEFIASFYNNDLIKINGELYRVIGVNNDLLNRIEVNMIDITYREYLENMNDKRPPHIIKTIASKTQSIKKYSTDILGNLYEVKSNKHPQIIKKG

SEQ ID NO: 969 - protein, 359 aa, synthetic construct
  REGION 1..359: note = Description of Artificial Sequence: Synthetic polypeptide
NKGYKHHAEDALIIANADFIFKEWKKLDKAKKVMENQMFEEKQAESMPEIETEQEYKEIFITPHQIKHIKDFKDYKYSHRVDKKPNRELINDTLYSTRKDDKGNTLIVNNLNGLYDKDNDKLKELINKSPEKLLMYHHDPQTYQKLKLIMEQYGDEKNPLYKYYEETGNYLTKYSKKDNGPVIKKIKYYGNKLNAHLDITDDYPNSRNMVVKLSLKPYRFDVYLDNGVYKFVTVKNLDVIKKENYYEVNSKCYEEAKKLKKISNQAEFMASFYKNDLIKFNGELYRVIGVNNDLLNRIEVNMIDITYREYLENMNDKRPPHIIKTIASKTQSIKKYSTDILGNLYEVKSKKHPQIIKKG

SEQ ID NO: 970 - protein, 359 aa, synthetic construct
  REGION 1..359: note = Description of Artificial Sequence: Synthetic polypeptide
NKGYKHHAEDALIIANADFIFKEWKKLDKAKKVMENQMFEEKQAESMPEIETEQEYKEIFITPHQIKHIKDFKDYKYSHRVDKKPNRELINDTLYSTRKDDKGNTLIVNNLNGLYDKDNDKLKKLINKSPEKLLMYHHDPQTYQKLKLIMEQYGDEKNPLYKYYEETGNYLTKYSKKDNGPVIKKIKYYGNKLNAHLNITDDYPNSRNKVVKLSLKPYRFDVYLDNGVYKFVTVKNLDVIKKENYYEVNSKCYEEAKKLKKISNQAEFISSFYSNDLIKINGELYRVIGVNNDLLNRIEVNMIDITYREYLENMNDKRPPHIIKRIASKTQSIKKYSTDILGNLYEVKSKKHPQIIKKG

SEQ ID NO: 971 - protein, 359 aa, synthetic construct
  REGION 1..359: note = Description of Artificial Sequence: Synthetic polypeptide
NKGYKHHAEDALIIANADFIFKEWKKLDKAKKVMENQMFEEKQAESMPEIETEQEYKEIVITPHQIKHIKDFKDYKYSHRVDKKPNRELINDTLYSTRKDDKGNTLIVNNLNGLYDKDNDKLKKLINKSPEKLLMYHHDPQTYQKLKLIMEQYGDEKNPLYKYYEETGNYLTKYSKKDNGPVIKKIKYYGNKLNAHLDITDDYPNSRNKVVKLSLKPYRFDVYLDNGVYKFVTVKNLDVIKKENYYEVNSKCYEEAKKLKKISNQAEFIASFYNNDLIKINGELYRVIGVNNDLLNRIEVNMIDITYREYLENMNDKRPPHIIKTIASKTQSIKKYSTDILGNLYEVKSKKHPEIIKKG

SEQ ID NO: 972 - protein, 359 aa, synthetic construct
  REGION 1..359: note = Description of Artificial Sequence: Synthetic polypeptide
NKGYKHHAEDALIIANADFIFKEWKKLDKAKKVMENQMFEEKQAESMPEIETEQEYKEIFITPHQIKHIKDFKDYKYSHRVDKKPNRELINDTLYSTRKDDKGNTLIVNNLNGLYDKDNDKLKKLINKSPEKLLMYHHDPQTYQKLKLIMEQYGDEKNPLYKYYEETGNYLTKYSKKDNGPVIKKIKYYGNKLNAHLDITDDYPNSRNKVVKLSLKPYRFDVYLDNGVYKFVTVKNLDVIKKENYYEVNSKCYEEAKKLKKISNQAEFIASFYNNDLIRINGELYRVIGVNNDLLNRIEVNMIDITYREYLENMNDKRPPHIIKTIASKTQSIKKYSTDILGNLYEVKSKKHPQIIKKG

SEQ ID NO: 973 - protein, 359 aa, synthetic construct
  REGION 1..359: note = Description of Artificial Sequence: Synthetic polypeptide
NKGYKHHAEDALIIANADFIFKEWKKLDKAKKVMENQMFEEKQAESMPEIETEQEYKEIFITPHQIKHIKDFKDFKYSHRVDKKPNRELINDTLYSTRKDDKGNTLIVNNLNGLYDKDNDKLKKLINKSPEKLLMYHHDPQTYQKLKLIMEQYGDEKNPLYKYYEETGNYLTKYSKKDNGPVIKKIKYYGNKLNAHLDITDNYPNSRNKVVKLSLKPYRFDVYLDNGVYKFVTVKNLDVIKKENYYEVNSKCYEEAKKLKKISNQAEFIASFYNNDLIKINGELYRVIGVNNDLLNRIEVNMIDITYRGYLENMNDKRPPHIIKTIASKTQSIKKYSTDILGNLYEVKSKKHPQIIKKG

SEQ ID NO: 974 - protein, 359 aa, synthetic construct
  REGION 1..359: note = Description of Artificial Sequence: Synthetic polypeptide
NKGYKHHAEDALIIANADFIFKEWKKLDKAKKVMENQMFEEKQAESMPEIETEQEYKEIFITPHQIKHIKDFKDYKYSHRVDKKPNRELINDTLYSTRKDDKGNTLIVNNLNGLYDKDNDKLKKLINKSPEKLLMYHHDPQTYQKLKLIMEQYGDEKNPLYKYYEETGNYLTKYSKKDNGPVIKKIKYYGNKLNAHLDITDDYPNSRNKVVKLSLKPYRFDVYLDNGVYKFVTVKNLDVIKKENYYEVNSKCYEEAKKLKKISNQAEFIASFYNNDLIKINGELYRVIGVNNDLLNRIEVNMIDITYREYLENMKDKRPPHIIKTIASKTQSIIKYSTDILGNLYEVKSKKHPQIIKKG

SEQ ID NO: 975 - protein, 359 aa, synthetic construct
  REGION 1..359: note = Description of Artificial Sequence: Synthetic polypeptide
NKGYKHHAEDALIIANADFIFKEWKKLDKAKKVMENQMFEEKQAESMPEIETEHEYKEIFITPHQIKHIKDFKDYKYSHRVDKKPNRELINDTLYSTRKDDKGNTLIVNNLNGLYDKDNDKLKKLINKSPEKLLMYHHDPQTYQKLKLIMEQYGDEKNPLYKYYEETGNYLTKYSKKDNGPVIKKIKYYGNKLNAHLDITDDYPNSRNKVVKLSLKPYRFDVYLDNGVYKFVTVKNLDVIKKENYYEVNSKCYEEAKKLKKISNQAEFIASFYNNDLIKINGELYRVIGVNNDLLNRIEVNMIDITYREYLENMNDKRPPHIIKTIASKTQSIKKYSTDILGNLYEVKSNKHPQIIKKG

SEQ ID NO: 976 - protein, 359 aa, synthetic construct
  REGION 1..359: note = Description of Artificial Sequence: Synthetic polypeptide
NKGYKHHAEDALIIANADFIFKEWKKLDKAKKVMENQMFEEKQAESMPEIETEQEYKEIFITPHQIKHINDFKDYKYSHRVDKKPNRELINDTLYSTRKDDKGNTLIVNNLNGLYDKDNDKLKKLINKSPEKLLMYHHDPQTYQKLKLIMEQYGDEKNPLYKYYEETGNYLTKYSKKDNGPVIKKIKYYGNKLNAHLDITDDYPNSRNKVVKLSLKPYRFDVYLDNGVYKFVTVKNLDVIKKENYYEVNSKCYEEAKKLKKISNQAEFIASFYNNDLIKINGELYRVIGVNNDLLNRIEVNMIDITYREYLENMNDKRPPHIIKTIASKTQSIKKYSTDILGNLYEVKSKKRPQIIKKG

SEQ ID NO: 977 - protein, 359 aa, synthetic construct
  REGION 1..359: note = Description of Artificial Sequence: Synthetic polypeptide
NKGYKHHAEDALIIANADFIFKEWKKLDKAKKLMENQMFEEKQAESMPEIETEQEYKEIFITPHQIKHIKDFKDYKYSHRVDKKPNRELINDTLYSTRKDDKGNTLIVNNLNGLYDKDNDKLKKLINKSPEKLLMYHHDPQTYQKLKLIMEQYGDEKNPLYKYYEETGNYLTKYSKKDNGPVIKKIKYYGNKLNAHLDITDDYPNSRNKVVKLSLKPYRFDVYLDNGVYKFVTVRNLDVIKKENHYEVNSKCYEEAKKLKKISNQAEFIASFYNNDLIKINGELYRVIGVNNDLLNRIEVNMIDITYREYLENMNDKRPPQIIKTIASKTQSIKKYSTDILGNLYEVKSKKHPQIIKKG

SEQ ID NO: 978 - protein, 359 aa, synthetic construct
  REGION 1..359: note = Description of Artificial Sequence: Synthetic polypeptide
NKGYKHHAEDALIIANADFIFKEWKKLDKAKKVMENQMFEEKQAESKPEIETEQEYKEIFITPHQIKHIKDFKDYKYSHRVDKKPNRKLINDTLYSTRKDDKGNTLIVNNLNGLYDKDNDKLKKLINKSPEKLLMYHHDPQTYQKLKLIMEQYGDEKNPLYKYYEETGNYLTKYSKKDNGPVIKKIKYYGNKLNAHLDITDDYPNSRNKVVKLSLKPYRFDVYLDNGVYKFVTVKNLDVIKKENYYEVNTKCYEEAKKLKKISNQAEFIASFYNNDLIKINGELYRVIGVNNDLLNRIEVNMIDITYREYLENMNDKRPPQIIKTIASKTQSIKKYSTDILGNLYEVKSKKHPQIVKKG

SEQ ID NO: 979 - protein, 359 aa, synthetic construct
  REGION 1..359: note = Description of Artificial Sequence: Synthetic polypeptide
NKGYKHHAEDALIIANADFIFKEWKKLDRAKKVMENQMFEEKQAESMPEIETEQEYKEIFITPHQIKHIKDFKDYKYSHRVDKKPNRELINDTLYSTRKDDKGYTLIVNNLNGLYDKDNDKLKKLINKSPEKLLMYHHDPQTYQKLKLIMEQYGDEKNPLYKYYEETGNYLTKYSKKDNGPVIKKIKYYGNKLNAHLDITDDYPNSRNKVVKLSLKPYRFDVYLDNGVYKFVTVKNLDVIKKENYYEVNSKCYEEAKKLKKISNQAEFIASFYNNDLIKINGELYRVIGVNNDLLNRIEVNMIDITYREYLENMNDKRPPQIIKTITSKTQSIKKYSTDILGNLYEVKSKKQPQIIKKG

SEQ ID NO: 980 - protein, 359 aa, synthetic construct
  REGION 1..359: note = Description of Artificial Sequence: Synthetic polypeptide
NKGYKHHAEDALIIANADFIFKEWKKLDKAKKVMENQMFEEKQAESMPEIETEQEYKEIFITPHQIKHIKDFKDYKYSHRVDKKPNRKLINDTLYSTRKDDKGNTLIVNNLNGLYDKDNDKLKKLINKSPEKLLMYHHDPQTYQKLKLILEQYGDEKNPLYKYYEETGNYLTKYSKKDNGPVIKKIKYYGNKLNAHLDITDDYPNSRNKVVKLSLKPYRFDVYLDNGVYKFVTVKNLDVIKKENYYEVNSKCYEEAKKLKKISNQAEFIASFYNNDLIKINGELYRVIGVNNDLLNRIEVNMIDITYREYLENMNDKRPPQIIKTIASKTQSIKKYSTDILGNLYEVKSKKHPQIIKKG

SEQ ID NO: 981 - protein, 359 aa, synthetic construct
  REGION 1..359: note = Description of Artificial Sequence: Synthetic polypeptide
NKGYKHHAEDALIIANADFIFKEWKKLDKAKKVMENQMFEEKQAESMPEIETEQEYKEIFITPHQIKHIKDFKDYKYSHRVDKKPNRKLINDTLYSTRKDDKGNTLIVNNLNGLYDKDNDKLKKLINKSPEKLLMYHHDPQTYQKLKLIMEQYGDEKNPLYKYYEETGNYLTKYSKKDNGPVIKKIKYYGNKLNAHLDITDDYPNSRNKVVKLSLKPYRFDVYLDNGIYKFVTVKNMDVIKKENYYEVNSKCYEEAKKLKKISNQAEFIASFYNNDLIKINGELYRVIGVNNDLLNRIEVNMIDITYREYIENMNDKRPPQIIKTIASKTQSIKKYSTDILGNLYEVKSKKHPQIIKKG

SEQ ID NO: 982 - protein, 359 aa, synthetic construct
  REGION 1..359: note = Description of Artificial Sequence: Synthetic polypeptide
NKGYKHHAEDALIIANADFIFKEWKKLDKAKKVMENQMFEEKQAESMPEIETEQEYKEIFITPHQIKHIKDFKDYKYSHRVDKKPNRELINDTLYSTRKDDKGNTLIVNNLNGLYDKDNDKLKKLINKSPEKLLMYHHDPQTYQKLKLIMEQYGDEKNPLYKYYEETGNYLTKYSKKDNGPVIKKIKYYGNKLNAHLDITDDYPNSRNKVVKLSLKPYRFDVYLDNGVYKFVTVRNLDVIKKENYYEVNSKCYEEAKKLKKISNQAEFIASFYNNDLIKINGELYRVIGVNNDLLNRIEVNMIDITYREYLENMNDKRPPQIIKTIASKTQSIKKYSTDILGNLYEVKSKKHPQVIKKG

SEQ ID NO: 983 - protein, 357 aa, synthetic construct
  REGION 1..357: note = Description of Artificial Sequence: Synthetic polypeptide
NKGYKHHAEDALIIANADFIFKEWKRLDKAKKVMENQMFEEKQAESMPEIETEQEYKEIFITPHQIKHIKDFKDYKYSHRVDKKPNRELINDTLYSTRKDDKGNTLIVNNLNGLYDKDNDKLKKLINKSPEKLLMYHHDPQTYQKLKLIMEQYGDDKNPLYKYYEETGNYLIKYSKKDNGPVIKKIKYYGNKLNAHLDITDDYPNSRNKVVKLSLKPYRFDVYLDNGVYKFVTVRNLDVIKKENYYEVNSKCYEEAKKLKKISNQAEFIAYFYNNDLIKINGELYRVIGVNNDLLNRIEVNMIDITYREYLENMNDKRPPQIIKTIASKTQSIKKYSTDILGNLYEVKSKKHPQIIK

SEQ ID NO: 984 - protein, 359 aa, synthetic construct
  REGION 1..359: note = Description of Artificial Sequence: Synthetic polypeptide
NKGYKHHAEDALIIANADFIFKEWKKLDKAKKVMENQMFEEKQAESMPEIETEQEYKEIFITPHQIKHIKDFKDYKYSHRVDKKPNRKLINDTLYSTRKDDKGNTLIVNNLNGLYDKDNDKLKKLINKSPEKLLMYHHDPQTYQKLKLIMEQYGDEKNPLYKYYEETGNYLTKYSKKDNGPVIKKIKYYGNKLNAHLDITDDYPNSRNKVVKLSLKPYRFDVYLDNGVYKFVTVKNLDVIKKENYYEVNSKCYEEAKKLKKISNQAEFIASFYNNDLIKINGELYRVIGVNNDLLNRIEVNMIDITYREYLENMNDKRPPQIIKTIASKTQSIKKYSTDILGNLYEVKSKKHPQITKKG

SEQ ID NO: 985 - protein, 356 aa, synthetic construct
  REGION 1..356: note = Description of Artificial Sequence: Synthetic polypeptide
NKGYKHHAEDALIIANADFIFKEWKKLDKAKKVMENQMFEEKQAESMPEIETEQEYKEIFITPHQIKHIKDFKDYKYSHRVDKKPNRELINDTLYSTRKDDKGNTLIVNNLNGLYDKDNDKLKKLINKSPEKLLMYHHDQQTYQKLKLIMEQYGDEKNPLYKYYEETGNYLTKYSKKDNGPVIKKIKYYGNKLNAHLDITDDYPNSRNKVVKLSLKPYRFDVYLDNGVYKFVTVKNLDVIKNENYYEVNSKCYEEAKKLKKISNQAEFIASFYNNDLIKINGELYRVIGVNNDLLNRIEVNMIDITYREYLENMNDKRPPQNIKTIASKTQSIKKYSTDILGNLYEVKSKKHPQII

SEQ ID NO: 986 - protein, 359 aa, synthetic construct
  REGION 1..359: note = Description of Artificial Sequence: Synthetic polypeptide
NKGYKHHAEDALIIANADFIFKEWKKLDKAKKVMENQMFEEKQAESMPEIETEQEYKEIFITPHQIKHIKDFKDYKYSHRVDKKPNRKLINDTLYSTRKDDKGNTLIVNNLNGLYDKDNDKLKKLINKSPEKLLMYHHDPQTYQKLKLIMEQYGDEKNPLYKYYEETGYYLTKYSKKDNGPVIKKIKYYGNKINAHLDITDDYPNSRNKVVKLSLKPYRFDVYLDNGVYKFVTVKNLDVIKKENYYEVNSKCYEEAKKLKKISNQAEFIASFYNNDLIKINGELYRVIGVNNDLLNRIEVNMIDITYREYLENMNDKRPPQIIKTIASKTQSIKKYSTDILGNLYEVKSKKHPQIVKKG

SEQ ID NO: 987 - protein, 359 aa, synthetic construct
  REGION 1..359: note = Description of Artificial Sequence: Synthetic polypeptide
NKGYKHHAEDALIIANADFIFKEWKKLDKAKKVMENQMFEEKQAESMPEIETEQEYKEIFITPHQIKHIKDFKDYKYSHRVDKKPNRELINDTLYSTRKDDKGNTLIVNNLNGLYDKDNDKLKKLINKSPEKLLMYHHDPQTYQKLKLIMEQYGDEKNPLYKYYEETGNYLTKYSKKDNGPVIKKIKYYGNKLNAHLDITDDYPNSRNKVVKLSLKPYRFDVYLDNGVYKFVTVKNLDVIKKENYYEVNSKCYEEAKKLKKISNQAEFIASFYNNDLIKINGELYRVIGVNNDLLNRIEVNMIDITYREYLENMNDKRPPQIIKTIASKTQSIKKYSTDILGNLYEVKSKKHPQIIKKG

SEQ ID NO: 988 - protein, 359 aa, synthetic construct
  REGION 1..359: note = Description of Artificial Sequence: Synthetic polypeptide
NKGYKHHAEDALIIANADFIFKEWKKLDKAKKVMENQMFEEKQAESMPEIETEQEYKEIFITPHQIKHIKDFKDYKYSHRVDKKPNRELINDTLYSTRKDDKGNTLIVNNLNGLYDKDNDKLKKLINKSPEKLLMYHHDPQTYQKLKLIMEQYGDEKNPLYKYYEETGNYLTKYSKKDNGPVIKKIKYYGNKLNAHLDITDDYPNSRNKVVKLSLKPYRFDVYLDNGVYKFVTVKNLDVIKKENYYEVNSKCYEEAKKLKKISNQAEFIASFYKNDLIKINGELYRVIGVNNDLLNRIEVNMIDITYREYLENMNDKRPPQIIKTIASKTQSIKKYSTDILGNLYEVKSKKHPQIIKKG

SEQ ID NO: 989 - protein, 359 aa, synthetic construct
  REGION 1..359: note = Description of Artificial Sequence: Synthetic polypeptide
NKGYKHHAEDALIIANADFIFKEWKKLDKAKKLMENQMFEEKQAESMPEIETEQEYKEIFMTPHQIKHIKDFKDYKYSHRVDKKPNRELINDTLYSTRKDDKGNTLIVNNLNGLYDKDNDKLKKLINKSPEKLLMYHHDPQTYQKLKLIMEQYGDEKNPLYKYHEETGNYLTKYSKKDNGPVIKKIKYYGNKLNAHLDITDDYPNSRNKVVKLSLKPYRFDVYLDNGVYKFVTVKNLDVIKKENYYEVNSKCYEEAKKLKKISNQAEFIASFYNNDLIKINGELYRVIGVNNDLLNRIEVNMIDITYREYLENMNDKRPPHIIKTIASKTQSIKKYSTDILGNLYEVKSKKHPQIIKKG

SEQ ID NO: 990 - protein, 353 aa, synthetic construct
  REGION 1..353: note = Description of Artificial Sequence: Synthetic polypeptide
NKGYKHHAEDALIIANADFIFKEWKKLDKAKKVMENQMFEEKQAESMPEIETEQEYKEIFITPHQIKHIKDFKDYKYSHRVDKKPNRELINDTLYSTRKDDKGNTLIVNNLNGLYDKDNDKLKKLINKSPEKLLMYHHDPQTYQKLKLIMEQYGDEKNPLYKYYEETGNYLTKYSKKDIGPVIKKIKYYGNKLNAHLDITDDYPNSRNKVVKLSLKPYRFDVYLDNGVYKFVTVKNLDVIKKENYYEVNSKCYEEAKKLKKISNQAEFIASFYNNDLIKINGELYRVIGVNNDLLNRIEVNMIDITYREYLENMNYKRPPQIIKTIASKTQSIKKYSSDILGNLYEVKSKKHP

SEQ ID NO: 991 - protein, 359 aa, synthetic construct
  REGION 1..359: note = Description of Artificial Sequence: Synthetic polypeptide
NKGYKHHAEDALIIANADFIFKEWKKLDKAKKVMENQMFEEKQAESMPEIETEQEYKEIFITPHQIKHIKDFKDYKYSHRVDKKPNRKLINDTLYSTRKDDKGNTLIVNNLNGLYDKDNDKLKKLINKSPEKLLMYHHDPQTYQKLKLIMEQYGDEKNPLYKYYEETGNYLTKYSKKDNGPVIKKIKYYGNKLNAHLDITDDYPNSRNKVVKLSLKPYRFDVYLDNGVYKFVTVKNLDVIKKENYYEVNSKCYEEAKKLKKISNQAEFIASFYNNDLIKINGELYRVIGVNNDLLNRIEVNMIDITYREYLENMNDKRPPQIINTIASKTQSIKKYSTDILGNLYEVKSKKHPQIIKKG

SEQ ID NO: 992 - protein, 359 aa, synthetic construct
  REGION 1..359: note = Description of Artificial Sequence: Synthetic polypeptide
NKGYKHHAEDALIIANADFIFKEWKKLDKAKKVMENQMFEEKQAESMPEIETEQEYKELFITPHQIKHIKDFKDYKYSHRVDKKPNRELINDTLYSTRKDDKGNTLIVNNLNGLYDKDNDKLKKLINKSPEKLLMYHHDPQTYQKLKLIMEQYGDEKNPLYKYYEETGNYLTKYSKKDNGPVIKKIKYYGNKLNAHLDITDDYPNSRNKVVKLSLKPYRFDVYLDNGVYKFVTVKNLDVIKKENYYEVNSKCYEEAKKLKKISNQAEFIASFYKNDLIKINGELYRVIGVNNDLLNRIEVNMIDITYREYLENMNDKRPPQIIKTIASKTQSIKKCSTDILGNLYEVKSKKHPQIIKKG

SEQ ID NO: 993 - protein, 359 aa, synthetic construct
  REGION 1..359: note = Description of Artificial Sequence: Synthetic polypeptide
NKGYKHHAEDALIIANADFIFKEWKKLDKAKKVMENQMFEKKQAESMPEIETEQEYKEIFITPHQIKHIKDFKDYKYSHRVDKKPNRGLINDTLYSTRKDDKGNTLIVNNLNGLYDKDNDKLKKLINKSPEKLLMYHHDPQTYQKLKLIMEQYGDEKNPLYKYYEDTGNYLTKYSKKDNGPVIKKIKYYGNKLNAHLDITDDYPNSRNKVVKLSLKPYRFDVYLDNGVYKFVTVKNLDLIKKENYYEVNSKCYEEAKKLKKISNQAEFIASFYNNDLIKINGELYRVIGVNNDLLNRIEVNMIDITYREYLENVNDKRPPQIIKTIASKTQSIKKYSTDILGNLYEVKSKKHPQIIKKG

SEQ ID NO: 994 - protein, 359 aa, synthetic construct
  REGION 1..359: note = Description of Artificial Sequence: Synthetic polypeptide
NKGYKHHAEDALIIANADFIFKEWKKLDKAKKVMENQMFEEKQAESMPEIETEQEYKEIFITPHQIKHIKDFKDYKYSHRVDKKPNRKLINDTLYSTRKDDKGNTLIVNNLNGLYDKDNDKLKKLINKSPEKLLMYHHDPQTYQKLKLIMEQYGDEKNPLYKYYEETGNYLTKYSKKDNGPVIKKIKYYGNKLNAHLDITDDYPNSRNKVVKLSLKPYRFDVYLDNGIYKFVTVKNLDVIKKENYYEVNSKCYEKAKKLKKISNQAEFIASFYNNDLIKINGELYRVIGVNNDLLNRIEVNMIDITYREYLENMNDKRPPQIIKTIASKTQSIKKYSTDILGNLYEVKSNKHPQIIKKG

SEQ ID NO: 995 - protein, 359 aa, synthetic construct
  REGION 1..359: note = Description of Artificial Sequence: Synthetic polypeptide
NKGYKHHAEDALIIANADFIFKEWKKLDKAKKVMENQMFEEKQAESMPEIETEQEYKEIFIIPHQIKHIKDFKDYKYSHRVDKKPNRKLINDTLYSTRKDDKGNTLIVNNLNGLYDKDNDKLKKLINKSPEKLLMYHHDPQTYQKLKLIMEQYGDEKNPLYKYYEETGNYLTKYSKKDNGPVIKKIKYYGNKLNAHLDITDDYPNSRNKVVKLSLKPYRFDVYLDNGVYKFVTVKNLDVIKKENYYEVNSKCYEEAKKLKKISNQAEFIASFYNNDLIKINGELYRVIGVNNDLLNRIEVNMIDITYREYLENMNDKRPPQIIKTIASKTQSIKKYSTDILGNLYEVKSKKHPQIIKKG

SEQ ID NO: 996 - protein, 359 aa, synthetic construct
  REGION 1..359: note = Description of Artificial Sequence: Synthetic polypeptide
NKGYKHHAEDALIIANADFIFKEWKKLDKAKKVMENQMFEEKQAESMPEIETQQEYKEIFITPHQIKHIKDFKDYKYSHRVDKKPNRKLINDTLYSTRKDDKGNTLIVNNLNGLYDKDNDKLKKLINKSPEKLLMYHHDPQTYQKLKLIMEQYGDEKNPLYKYYEETGNYLTKYSKKDNGPVIKKIKYYGNKLNAHLDITDDYPNSRNKVVKLSLKPYRFDVYLDNGVYKFVTVKNLDVIKKENYYEVNSKCYEEAKKLKKISNQAEFIASYYNNDLIKINGELYRVIGVNNDLLNRIEVKMIDITYREYLENMNDKRPPQIIKTIASKTQSIKKYSTDILGNLYEVKSKKHPHIIKKG

SEQ ID NO: 997 - protein, 359 aa, synthetic construct
  REGION 1..359: note = Description of Artificial Sequence: Synthetic polypeptide
NKGYKHHAEDALIIANADFIFKEWKKLDKAKKVMENQMFEEKQAESMPEIETEQEYKEIFITPHQIKHIKDFKDYKYSHRVDKKPNRKLINDTLYSTRKDDKGNTLIVNILNGLYDKDNDKLKKLINKSPEKLLMYHHDPQTYQKLKLIMEQYGDEKNPLYKYYEETGNYLTKYSKKDNGPVIKKIRYYGNKLNAHLDITDDYPNSRNKVVKLSLKPYRFDVYLDNGVYKFVTVKNLDVIKKENYYEVNSKCYEEAKKLKKISNQAEFIASFYNNDLIKINGELYRVIGVNNDLLNRIEVNMIDITYREYLENMNDKRPPQIIKTIASKTQSIKKYSTDILGNLYEVKSKKHPQIIKKG

SEQ ID NO: 998 - protein, 359 aa, synthetic construct
  REGION 1..359: note = Description of Artificial Sequence: Synthetic polypeptide
NKGYKHHAEDALIIANADFIFKEWKKLDKAKKVMENQMFEEKQAESMPEIETEQEYKEIFITPHQIKHIKDFKDYKYSHRVDKKPNRKLINDTLYSTRKDDKGNTLIVNNLNGLYDKDNDKLKKLINKSPEKLLMYHHDPQTYQKLKLIMEQYGDEKNPLYKYYEETGNYLTKYSKKDNGPVIKKIKYYGNKLNAHLDITDDYPNSRNKVVKLSLKPYRFDVYLDNGVYKFVTVKNLDVIKKENYYEVNSKCYEEAKKLKKISNQAEFIASFYNNDLIKINGELYRVIGVNNDLLNRIEVNMIDITYREYFENMNVKRPPQIIKTIASKTQSIKKYSTDILGNLYEVKSKKHPQIIKKG

SEQ ID NO: 999 - protein, 359 aa, synthetic construct
  REGION 1..359: note = Description of Artificial Sequence: Synthetic polypeptide
NKGYKHHAEDALIIANADFIFKEWKKLDKAKKVMENQMFEEKQAESMPEIETEQEYKEIFITPHQIKHIKDFKDYKYSHRVDKKHNRELVNDTLYSTRKDDKGNTLIVNNLNGLYDKDNDKLKKLINKSPEKLLMYHHDPQTYQKLKLIMEQYGDEKNPLYKYYEETGNYLTKYSKKDNGPVIKKIKYYGNKLNAHLDITDDYPNSRNKVVKLSLKPYRFDVYLDNGVYKFVTVKNLDVIKKENYYEVNSKCYEEAKKLKKISNQAEFIASFYNNDLIKINGELYRVIGVNNDLLNRIEVNMIDITYREYLENMNDKRPPQIIKTITSKTQSIKKYSTDILGNLYEVKSKKHPQIIKKG

SEQ ID NO: 1000 - protein, 359 aa, synthetic construct
  REGION 1..359: note = Description of Artificial Sequence: Synthetic polypeptide
NKGYKHHAEDALIIANADFIFKEWKKLDKAKKVMENQMFEEKQAESMPEIETEQEYKEIFITPHQIKHIMDFKDYKYSHRVDKKPNRELINDTLYSTRKDEKGNTLIVNNLNGLYDKDNDKLKKLINKSPEKLLMYHHDPQTYQKLKLIMEQYGDEKNPLYKYYEETGNYLTKYSKKDNGPVIKKIKYYGNKLNAHLDITDDYPNSRNKVVKLSLKPYRFDVYLDNGVYKFVTVRNLDVIKKENYYEVNSKCYEEAKKLKKISNQAEFIASFYNNDLIKINGELYRVIGVNNDLLNRIEVNMIDITYREYLENMNDKRPPQIIKTIASKTQSIKKYSTDILGNLYEVKSKKHPQIIKKG

SEQ ID NO: 1001 - protein, 359 aa, synthetic construct
  REGION 1..359: note = Description of Artificial Sequence: Synthetic polypeptide
NKGYKHHAEDALIIANADFIFKEWKKLDKAKKVMENQMFEEKQAVSMPEIETEQEYKEIFINPHQIKHIKDFKDYKYSHRVDKKPNRELINDTLYSTRKDDKGNTLIVNNLNGLYDKYNDKLKKLINKSPEKLLMYHHDPQTYQKLKLIMEQYGDEKNPLYKYYEETGNYLTKYSKKDNGPVIKKIKYYGNKLNAHLDITDDYPNSRNKVVKLSRKPYRFDVYLDNGVYKFVTVKNLDVIKKENYYEVNSKCYEEAKKLKKISNQAEFIASFYNNDLIKINGELYRVIGVNNDLLNRIEVNMIDITYREYRENMNDKRPPQIIKTIASKTQSIKKYSTDILGNLYEVKSKKHPQIIKKG

SEQ ID NO: 1002 - protein, 359 aa, synthetic construct
  REGION 1..359: note = Description of Artificial Sequence: Synthetic polypeptide
NKGYKHHAEDALIIANADFIFKEWKKLDKAKKVMENQMFEEKQAESMPEIETEQEYKEIFITPHQIKHIKDFKDYKYSHRVDKKPNRELINDTLYSTRKDDKGNTLIVNNLNGLYDKDNDKLKKLINKSPEKLLMYHHDPQTYQKLKLIMEQYGDEKNPLYKYYEETGNYLTKYSKKDNGPVIKKIKYYGNKLNAHLDITDDYPNSRNKVVKLSLKPYRFDVYLDNGVYKFVTVKNLDVIKNENYYEVNSKCYEEAKKLKKISNQAEFIASFYNNDLIKINGELYRVIGVNNDLLNRIEVNMIDITYREYLENINGKRPPQIIKTITSKTQSIKKYSTDILGNLYEVKSKKHPQIIKKG

SEQ ID NO: 1003 - protein, 359 aa, synthetic construct
  REGION 1..359: note = Description of Artificial Sequence: Synthetic polypeptide
NNGYKHHAEDALIIANADFIFKEWKKLDKAKKVMENQMFEEKQAESMPEIETEQEYKEIFITPHQIKHIKEFKDYKYSHRVDKKPNRKLINDTLYSTRKDDKGNTLIVNNLNGLYDKDNDKLKKLINKSPEKLLMYHHDPQTYQKLKLIMEQYGDEKNPLYKYYEETGIYLTKYSKKDNGPVIKKIKYYGNKLNAHLDITDDYPNSRNKVVKLSLKPYRFDVYLDNGVYKFVTVKNLDVIKKENYYEVNSKCYGEAKKLKKISNQAEFIASFYNNDLIKINGELYRVIGVNNDLLNRIEVNMIDITYREYLEIMNDKRPPQIIKTIASKTQSIKKYSTDILGNLYEVKSNKHPQIIKKG

SEQ ID NO: 1004 - protein, 359 aa, synthetic construct
  REGION 1..359: note = Description of Artificial Sequence: Synthetic polypeptide
NKGYKHHAEDALIIANADFIFKEWKKLDKAKKVMENQMFEEKQAESMPEIETEQEYKVIFITPHQIKHIKDFKDYKYSHRVDKKPNRKLINDTLYSTRKDDKGNTLIVNNLNGLYDKDNDKLKKLINKSPEKLLMYHHDPQTYQKLKLIMEQYGDEKNPLYIYYEETGNYLTKYSKKDNGPVIKKIKYYGNKLNAHLDITDDYPNSRNKVVKLSLKPYRFDVYLDNGVYKFVTVKNLDVIKKENYYEVNSKCYEEAKKLKKISNQAEFIASFYNNDLIKINGELYRVIGVNNDLLNRIEVNMIDITYREYLENMNDKRPPQIIKTIASKTQSIKKYSTDILGNVYEVKSKKHPQIIIKG

SEQ ID NO: 1005 - protein, 359 aa, synthetic construct
  REGION 1..359: note = Description of Artificial Sequence: Synthetic polypeptide
NKGYKHHAEDALIIANADFIFKEWKKLDKAKKVMENQMFEEKQAESMPEIETGQEYKEIFITPHQIKHIKDFKDYKYSHRVDKKPNRKLINDTLYSTRKDDKGNTLIVNNLNGLYDKDNDKLKKLINKSPEKLLMYHHDPQTYQKLKLIMEQYGDEKNPLYKYYEETGNYLTKYSKKDNGPVIKKIKYYGNKLNAHLDITDDYPNSRNKVVKLSLKPYRFDVYLDNGVYKFVTVKNLDVIKKENYYEVNSKCYEEAKKLKKISNQAEFIASFYNNDLIKINGELYRVIGVNNDLLNRIEVNMIDITYREYLENMNDKRPPQIIKTIASKTQSIKKYSTDILGNLYEVKSKKHPQIIKKG

SEQ ID NO: 1006 - protein, 359 aa, synthetic construct
  REGION 1..359: note = Description of Artificial Sequence: Synthetic polypeptide
NKGYKHHAEDALIIANADFIFKEWKKLDKSKKVMENQMFEEKQAESMPEIETEQEYKEIFITPHQIKHIKDFKDYKYSHRVDKKHNRKLINDTLYSTRKDDKGNTLIVNNINGLYDKDNDKLKKLINKSPEKLLMYHHDPQTYQKLKLIMEQYGDEKNPLYKYYEETGNYLTKYSKKDNGPVIKKIKYYGNKLNAHLDITDDYPNSRNKVVKLSLKPYRFDVYLDNGVYKFVTVKNLDVIKKENYYEVNSKCYEEAKKLKKISNQAEFIASFYNNDLIKINGELYRVIGVNNDLLNRIEVNTIDITYREYLENMNDKRPPQIIKTIASKTQSIKKYSTDILGNLYEVKPKKHPQIIKKG

SEQ ID NO: 1007 - protein, 353 aa, synthetic construct
  REGION 1..353: note = Description of Artificial Sequence: Synthetic polypeptide
NKGYKHHAEDALIIANADFIFKEWKKLDKAKKVMENQMFEEKQAESMPEIETEQEYKEIFITPHQIKHIKDFKDYKYSHRVDKKPNRKLINDTLYSTREDDKGNTLIVNNLNGLYDKDNDKLKKLINKSPEKLLMYHHDPQTYQKLKLIMEQYGDEKNPLYKYYEETGNYLTKYSKKDNGPVIKKIKYYGNKLNAHLDISDDYPNSRNKVVKLSLKPYRFDVYLDNGVYKFVTVKNLDVIKKENYYEVNSKCYEEAKKLKKISNQAEFIASFYNNDLIKINGELYRVIGVNNDLLNRIEVNMIYITYREYLENMNDKRPPQIIKTIASKTQSIKKYSTDILGNLYEVKSKKHP

SEQ ID NO: 1008 - protein, 359 aa, synthetic construct
  REGION 1..359: note = Description of Artificial Sequence: Synthetic polypeptide
NKGYKHHAEDALIIANADFIFKEWKKLDKAKKVMENQMFEEKQAESMPEIETEQEYKEIFITPYQIKHIKDFKDYKYSHRVDKKPNRELINDTLYSTRKDDKGNTLIVNNLNGLYDKDNDKLKKLINKSPEKLLMYHHDPQTYQKLKLIMEQYGDEKNPLYKYYEETGNYLTKYSKKDNGPVIKKIKYYGNKLNAHLDITDDYPNSRNKVVKLSLKPYRFDVYLDNGVYKFVTVRNLDVIKKENYYEVNSKCYEEAKKLKKISNQAEFIASFYNNDLIKINGELYRVIGVNNDLLNRIEVNMIDITYREYLENMNDKRPPQIIKTIASKTQSIKKYSTDILGNLYEVKSKKHPQIIKKG

SEQ ID NO: 1009 - protein, 359 aa, synthetic construct
  REGION 1..359: note = Description of Artificial Sequence: Synthetic polypeptide
NKGYKHHAEDALIIANADFIFKEWKKLDNAKKVMENQMFEEKRAESMPEIETEQEYKEIFITPHQIKHIKDFKDFKYSHMVDKKPNRKLINDTLYSTRKDDKGNTLIVNNLNGLYDKDNDKLKKLINKSPEKLLIYHHDPQTYQKLKLIMEQYGDEKNPLYKYYEETGNYLTKYSKKDNGPVIKKIKYYGNKLNAHLDITDDYPNSRNKVVKLSLKPYRFDVYLDNGVYKFVTVKNLDVIKKENYYEVNSKCYEEAKKLKKISNQAEFIASFYNNDLIKINGELYRVIGVNNDLLNRIEVNMIDITYREYLENMNDKRPPQIIKTIASKTQSIKKYSTDILGNLYEVKSKKHPQIIKKG

SEQ ID NO: 1010 - protein, 353 aa, synthetic construct
  REGION 1..353: note = Description of Artificial Sequence: Synthetic polypeptide
NKGYKHHAEDALIIANADFIFKEWIRLDKAKKVMENQMFEEKQAESMPEIETEQEYKEIFITPHQIKHIKDFKDYKYSHRVDKKPNRKLINDTLYSTRKDDKGNTLIVNNLNGLYDKDNDKLKKLINKSPEKLLMYHHDPQTYQKLKLIMEQYGDEKNPLYKYYEETGNYLTKYSKKDNGPVIKKIKYYGNKLNAHLDITDDYPNSRNKVVKLSLKPYRFDVYLDNGVYKFVTVKNLDVIKKENYYEVNSKCYEEAKKLKKISNQAEFIASFYNNDLIKINGELYRVIGVNNDLLNRIEVNMIDITYREYLENMNDKRPPQIIKTIASKTQSIKKYSTDILGNLYEVKSKKHP

SEQ ID NO: 1011 - protein, 353 aa, synthetic construct
  REGION 1..353: note = Description of Artificial Sequence: Synthetic polypeptide
NKGYKHHAEDALIVANADFIFKEWKKLDKAKKVMENQMFEEKQAESMPEIETEQEYKEIFITPHQIKHIKDFKDYKYSHRVDKKPNRELINDTLYSTRKDDKGNTLIVINLNGLYDKDNDKLKKLINKSPEKLLMYHHDPQTYQKLKLIMEQYGDEKNPLYKYYEETGNYLTKYSKKDNGPVIKKIKYYGNKLNAHLDITDDYPNSRNKVVKLSLKPYRFDVYLDNGVYKFVTVKNLDVIKKENYYEVNSKCYEEAKKLKKISNQAEFIASFYNNDLIKINGELYRVIGVNNDLLNRIEVNMIDITYREYLENMNDKRPPQIIKTIASKTQSIKKYSTDILGNLYEVKSKKHP

SEQ ID NO: 1012 - protein, 353 aa, synthetic construct
  REGION 1..353: note = Description of Artificial Sequence: Synthetic polypeptide
NKGYKHHAEDALIIANADFIFKEWKKLDKAKKVMENQMFEEKQAESMPEIETEQEYKEIFITPHQIKHIKDFKDYKYSHRVDKKPNRKLINDTLYSTRKDDKGNTLIVNNLNGLYDKDNDKLKKLINKSPEKLLMYHHDPQTYQKLKLIMEQYGDEKNPLYKYYEETGNYLTKYSKKDNGPVIKKIKYYGNKLNAHLDITDDYPNSRNKVVKLSLKPYRFDVYLDNGVYKFVTVKNLDVIKKENYYEVNSKCYEEAKKLKKISNQAEFIASFYNNDLIKINGELYRVIGVNNDLLNRIEVNMIDITYREYLENMNDKRPPQIIKTIASKTQSIKKYSTDILGNLYEVKSKKHP

SEQ ID NO: 1013 - protein, 359 aa, synthetic construct
  REGION 1..359: note = Description of Artificial Sequence: Synthetic polypeptide
NKGYKHHAEDALIIANADFIFKEWKKLDKAKKVMENQMFEEKQAMSMPEIETEQEYKEIFITPHQIKHIKDFKDYKYSHRVDKKPNRELINDTLYSTRKDDKGNTLIVNNLNGLYDKDNDKLKKLINKSPEKLLMYHHDPQTYQKLKLIMEQYGDEKNPLYKYYEETGNYLTKYSKKDNGPVIKKIKYYGNKLNAHLDITDDYPDSRNKVVKLSLKPYRFDVYLDNGVYKFVTVKNLDVIKKENYYEVNSKCYEEAKKLKKISNQAEFIASFYNNDLIKINGELYRVIGVNNDLLNRIEVNMIDITYREYLENMNDKRPPHIIKTIASKTQSIKKYSTDILGNLYEVKSQKHPQIIKKG

SEQ ID NO: 1014 - protein, 359 aa, synthetic construct
  REGION 1..359: note = Description of Artificial Sequence: Synthetic polypeptide
NKGYKHHAEDALIIANADFIFKEWKKLDKAKKVMENQMFEEKQAGSMPEIETEQEYKEIFITPHQIKHIKDFKDYKYSHRVDKKPNRKLINDTLYSTRKDDKGNTLIVNNLNRLYDKDNDKLKKLINKSPEKLLMYHHDPQTYQKLKLIMEQYGDEKNPLYKYYEETGNYLTKYSKKDNGPVIKKIKYYGNKLNAHLDITDDYPNSRNKVVKLSLKPYRFDVYLDNGVYKFVTVKNLDVIKKENYYEVNSKCYEEAKKLKKISNQAEFIASFYNNDLIKINGELYRVIGVNNDLLNRIEVNMIDITYREYLESMNDKRPPQIIKTIASKTQTIKKYSTDILGNLYEVKSKKHPQIIKKG

SEQ ID NO: 1015 - protein, 359 aa, synthetic construct
  REGION 1..359: note = Description of Artificial Sequence: Synthetic polypeptide
NKGYKHHAEDALIIANADFIFKEWKKLDKAKKVMENQMFEEKQAESMPEIETEQEYKEIFITPHQIKHIKDFKDYKYSHRVDKKPNRELINDTLYSTRKDDKGNTLIVNNLNGLYDKDNDKLKKLTNKSPGKLLMYHHDPQTYQKLKLIMEQYGDEKNPLYKYYEETGNYLTKYSKKDNGPVIKKIKYYGNKLNAYLDITDDYPNSRNNVVKLSLKPYRFDVYLDNGVYKFVTVKNLDVIEKENYYEVNSKCYEEAKKLKKISNQAEFIASFYNNDLIKINGELYRVIGVNNDLLNRIEVNMIDITYREYLENMNDKRPPHIIKTIASKTQSIKKYSTDILGNLYEVKSKKHPQIIKKG

SEQ ID NO: 1016 - protein, 359 aa, synthetic construct
  REGION 1..359: note = Description of Artificial Sequence: Synthetic polypeptide
NKGYKHHAEDALIIANADFIFKEWKKLDKAKKVMENQMFEEKQAESMPEIETEQEYKEIFITPHQIKHIKDFKDYKYSHRVDKKPNRKLINDTLYSTRKDDKGNTLIVNNLNGLYDKDNDKFKKLINKSPEKLLMYHHDPQTYQKLKLIMEQYGDEKNPLYKYYEETGNYLTKYSKKDNGPVIKKIKYYGNKLNAHLDITDDYPNSRNKVVKLSLKPYRFDVYLDNGVYKFVTVKNLDVIKKDNYYEVNSKCYEEAKKLKKISNQAEFIASFYNNDLIKINGELYRVIGVNNDLLNRIEVNMIDITYREYLENMNDKRPPQIIKTIATKTQSIKKYSTDILGNLYEVKSKKHPQIIKKG

SEQ ID NO: 1017 - protein, 357 aa, synthetic construct
  REGION 1..357: note = Description of Artificial Sequence: Synthetic polypeptide
NKGYKHHAEDALIIANADFIFKEWKKLDKAKKVMENQMFEEKHAESMPEIETEQEYKEIFITPHQIKHIKDFKDYKYSHRVDKKPNRELINDTLYSTRKDDKGNTLIVNNLNGLYDKDNDKLKKLIDKSPEKLLMYHHDPQTYQKLKLIMEQYGDEKNPLYKYYEETGNYLTKYSKKDNGPVIKKIKYYGNKLNAHLDITDDYPNSRNKVVKLSLKPYRFDVYLDNGVYKFVTVKNLDVIKKENYYEVNSKCYEEAKKLKKISNQAEFIASFYNNDLIKINGELYRVIGVNNDLLNRIEVNMIDITYREYLENMNDKRPPQIIKTIASKTQSIKKYSTDILGNLYEVKSKKHPQIIK

SEQ ID NO: 1018 - protein, 359 aa, synthetic construct
  REGION 1..359: note = Description of Artificial Sequence: Synthetic polypeptide
NKGYKHHAEDALIIANADFIFKEWKKLDKAKKVMENQMFEEKQAESMPEIETEQEYNEIFITPHQIKHIKDFKDYKYSHRVDKKPNRKLINDTLYSTRKDDKGNTLIVNNLNGLYDKDNDKLKKLINKSPEKLLMYHHDPQTYQKLKLIMEQYGDEKNPLYKYYEETGNYLTKYSKKDNGPVIKKIKYYGNKLNAHLDITDDYPNSRNKVVKLSLKPYRFDVYLDNGVYKFVTVKNLYVIKKENYYEVNSKCYEEAKKLKKISNQAEFIASFYNNDLIKINGELYRVIGVNNDLLNRIEVNMIDITYREYLENMNDKRPPQIIKTIASKTQSIKKYSTDILGNLYEVKSKKHPQIIKKG

SEQ ID NO: 1019 - protein, 359 aa, synthetic construct
  REGION 1..359: note = Description of Artificial Sequence: Synthetic polypeptide
NKGYKHHAEDALIIANADFIFKEWKKLDKAKKVMENQMFEEKQAESMPEIETEQEYKEIFITPHQIKHIKDFKDYKYSHRVDKKPNRKLINDTLYSTRKDDKGNTLIVNNLNGLYDKDNDKLKKLINKSPEKLLMYHHDPQTYQKLKLIMEQYGDEKNPLYKYYEETGNYLTKYSKKDNGPVIKKIKYYGNKLNAHLDITDDYPNSRNKVVKLSLKPYRFDVYLDNGVYKFVTVKNLDVIKKENYYEVNSKCYEEAKKLKKISNQAEFIASFYNNDLIKINGELYRVIGVNNDLLNRIEVNMIDITYREYLENMNDKRPPQIIKTIASKTQSIKKYSTDILGNLYEVKSKKHPQIIKKG

SEQ ID NO: 1020-1021 - skipped (2 entries)
